(19) United States
(12) Patent Application Publication
(10) Pub. No.: US 2019/0022092 A1
(43) Pub. Date: Jan. 24, 2019

(54) Therapeutic Combinations of a BTK Inhibitor and a GITR Binding Molecule, a 4-1BB Agonist, or an OX40 Agonist

(71) Applicant: Acerta Pharma B.V., Oss (NL)

(72) Inventors: Wayne Rothbaum, Delray Beach, FL (US); Brian Lannutti, Solana Beach, CA (US)

(21) Appl. No.: 15/760,370

(22) PCT Filed: Sep. 15, 2016
(86) PCT No.: PCT/IB2016/055515

§ 371 Date: Mar. 15, 2018

Related U.S. Application Data
(60) Provisional application No. 62/219,097, filed on Sep. 15, 2015.
(60) Provisional application No. 62/234,619, filed on Sep. 29, 2015.
(60) Provisional application No. 62/234,655, filed on Sep. 29, 2015.
(60) Provisional application No. 62/272,400, filed on Dec. 29, 2015.
(60) Provisional application No. 62/325,750, filed on Apr. 21, 2016.

(51) Int. Cl. A61K 31/4985; A61K 39/395; A61P 35/00; A61P 35/02

(52) U.S. Cl. CPC A61K 31/4985; A61K 39/39566; A61K 2039/505; A61P 35/02; A61P 35/00

(57) ABSTRACT

Therapeutic combinations of a molecule selected from the group consisting of a GITR binding molecule, a 4-1BB agonist, an OX40 agonist, and combinations thereof and a Bruton's tyrosine kinase (BTK) inhibitor are described. In some embodiments, the invention provides pharmaceutical compositions comprising combinations of a molecule selected from the group consisting of a GITR binding molecule, a 4-1BB agonist, an OX40 agonist, and combinations thereof and a BTK inhibitor, and methods of treating a disease using a molecule selected from the group consisting of a GITR binding molecule, a 4-1BB agonist, an OX40 agonist, and combinations thereof and a BTK inhibitor, in particular a cancer or an immune, autoimmune, or inflammatory disease. In some embodiments, the invention provides pharmaceutical compositions comprising combinations of a molecule selected from the group consisting of a GITR binding molecule, a 4-1BB agonist, an OX40 agonist, and combinations thereof, a PD-1 or a PD-L1 inhibitor, and a BTK inhibitor, and methods of treating a disease using a molecule selected from the group consisting of a GITR binding molecule, a 4-1BB agonist, an OX40 agonist, and combinations thereof, a PD-1 or a PD-L1 inhibitor, and a BTK inhibitor, in particular a cancer or an immune, autoimmune, or inflammatory disease.

### FIELD OF THE INVENTION

[0001] The present invention generally relates to the field of infrastructures for mass transit vehicles. More specifically, the invention relates to a switch for a monorail guide beam using gravity to assist in its operation.

### BACKGROUND OF THE INVENTION

[0002] Elevated monorail guideways, adapted to support and guide monorail vehicles, are imposing infrastructures. As these guideways constitute a circuit, providing many travelling options to a traveler, they use switches permitting the selection of the direction in which the monorail is to travel. The same as for the rest of the guideway, these switches are also imposing pieces of infrastructure. Such switches, typically made of one or more moveable beams, have to combine two opposing objectives: by nature, they have to be mobile to switch between a tangent position and a turnout position, but they are also required to precisely hold that position once in place, withstanding the vertical and lateral forces imposed by the travelling monorail. Consequently, these switches typically require large actuators to move them and to hold them in place.

[0003] Different types of monorail switches exist. A first type is the replacement beam switch where two beams, usually one being straight and the other one being curved, are attached to each other at a predetermined distance. The switch is operated by laterally displacing the beams, one replacing the other to complete the guideway. The drawback of these switches is that they take up much space on each side of the guideway, requiring additional infrastructure.

[0004] A second type of switch is known as the pivot switch. It uses a single beam pivoted at its base. Although very simple and compact, this design creates a sharp angular deviation of the beam alignment when the beam is in its turnout position. Not only does this sharp deviation result in noticeable discomfort for travelers in a monorail going across this switch, but it also creates high lateral loads on the travelling monorail. Consequently, this type of switch requires much reduced speeds through the turnout position in order to limit loads on the monorail vehicle.

Cancer Res. 2006, 66, 4904-12; Azuma, Crit. Rev. Immunol. 2010, 30, 547-57. For example, T cell stimulation through GITR attenuates Treg-mediated suppression and enhances tumor-killing by CD4⁺ and CD8⁺ T cells. GITR is constitutively expressed at high levels in Tregs (such as CD4⁺CD25⁺ or CD8⁺CD25⁺ cells) and is additionally upregulated upon activation of these cells. Nocentini and Riccardi, Eur. J. Immunol. 2005, 35, 1016-1022. GITR is a co-activating signal to both CD4⁺ and CD8⁺ naïve T cells, and induces and enhances proliferation and effector function, particularly in situations where T cell receptor (TCR) stimulation is suboptimal. Schaer, et al., Curr. Opin. Immunol. 2012, 24, 217-224. The enhanced immune response caused by antigen binding GITR proteins, such as fusion proteins and anti-GITR antibodies (including agonistic antibodies), may be used in a variety of immunotherapy applications, such as the treatment of a variety of cancers, autoimmune diseases, inflammatory diseases, or infections.

[0005] 4-1BB (also known as 4-1BB ligand, CD137 and/or TNFRSF9), which was first identified as an inducible costimulatory receptor expressed on activated T cells, is a membrane spanning glycoprotein of the Tumor Necrosis Factor (TNF) receptor superfamily. Watts, Annu. Rev. Immunol. 2005, 23, 23-68. 4-1BB is a type 2 transmembrane glycoprotein that is expressed on activated T lymphocytes, and to a larger extent on CD8+ than CD4+ T cells. 4-1BB is also expressed on dendritic cells, follicular dendritic cells, natural killer cells, granulocytes and cells of blood vessel walls at sites of inflammation. 4-1BB expression has also been demonstrated on tumor vasculature and atherosclerotic endothelium. The ligand that stimulates 4-1BB (4-1BBL) is expressed on activated antigen-presenting cells (APCs), myeloid progenitor cells and hematopoietic stem cells.

[0006] 4-1BB is an activation induced T-cell costimulatory molecule. Signaling via 4-1BB upregulates survival genes, enhances cell division, induces cytokine production, and prevents activation-induced sell death in T cells. Current understanding of 4-1BB indicates that expression is generally activation dependent and encompasses a broad subset of immune cells including activated NK and NKT cells; regulatory T cells; dendritic cells (DC) including follicular DC; stimulated mast cells, differentiating myeloid cells, monocytes, neutrophils, eosinophils, and activated B cells. 4-1BB strongly enhances the proliferation and effector function of CD8+ T cells. Crosslinking of 4-1BB enhances T cell proliferation, IL-2 secretion survival and cytolytic activity. Additionally, anti-4-1BB monoclonal antibodies possess strong antitumor properties, which in turn are the result of their powerful CD8+ T-cell activating, IFN-g producing, and cytolytic marker-inducing capabilities. Vinay and Kwon, Mol. Cancer Therapeutics 2012, 11, 1062-70; Lee, et al., PLoS One, 2013, 8, e69677, 1-11.

[0007] Interaction of 4-1BB on activated normal human B cells with its ligand at the time of B cell receptor engagement stimulates proliferation and enhances survival. The potential impact of 4-1BB engagement in B cell lymphoma has been investigated in at least two published studies. Evaluation of several types of human primary NHL samples indicated that 4-1BB was expressed predominantly on infiltrating T cells rather than the lymphoma cells. Houot, et al., Blood, 2009, 114, 3431-38. The addition of 4-1BB agonists to in vitro cultures of B lymphoma cells with, rituximab and NK cells resulted in increased lymphoma killing. Kohrt, et al., Blood, 2011, 117, 2423-32. In addition, B cell immunophenotyping was performed in two experiments using PF-05082566 in cynomolgus monkeys with doses from 0.001-100 mg/kg; in these experiments peripheral blood B cell numbers were either unchanged or decreased, as described in International Patent Application Publication No. WO 2015/119923.

[0008] 4-1BB is undetectable on the surface of naïve T cells but expression increases upon activation. Upon 4-1BB activation, TRAP 1 and TRAP 2, which are pro-survival members of the TNFR-associated factor (TRAP) family, are recruited to the 4-1BB cytoplasmic tail, resulting in downstream activation of NFkB and the Mitogen Activated Protein (MAP) kinase cascade including Erk, Jnk, and p38 MAP kinases. NFkB activation leads to upregulation of Bfl-1 and Bel-XL, pro-survival members of the Bcl-2 family. The pro-apoptotic protein Bim is downregulated in a TRAF1 and Erk dependent manner. Sabbagh, et al., J. Immunol. 2008, 180, 8093-8101.

[0009] Reports have shown that 4-1BB agonist monoclonal antibodies (mAbs) increase costimulatory molecule expression and markedly enhance cytolytic T lymphocyte responses, resulting in anti-tumor efficacy in various models. 4-1BB agonist mAbs have demonstrated efficacy in prophylactic and therapeutic settings and both monotherapy and combination therapy tumor models and have established durable anti-tumor protective T cell memory responses. Lynch, et al., Immunol Rev., 2008, 222, 277-286. 4-1BB agonists also inhibit autoimmune reactions in a variety of autoimmunity models. Vinay, et aL, J. Mol. Med. 2006, 84, 726-36.

[0010] The OX40 receptor (OX40R) (also known as CD134, ACT-4, and ACT35) is a member of the TNF receptor family which is expressed on activated CD4+ T-cells (see WO 95/12673). Triggering of this receptor via the OX40 ligand, named OX40L, gp34 or ACT-4-ligand, which is present on activated B-cells and dendritic cells, enhances the proliferation of CD4+ T-cells during an immune response and influences the formation of CD4+ memory T-cells. Furthermore, the OX40R-OX40L system mediates adhesion of activated T-cells to endothelial cells, thus directing the activated CD4+ T-cells to the site of inflammation.

[0011] It has been shown that OX40+ T-cells are present within tumor lesions containing tumor infiltrating lymphocytes and in tumor cell positive draining lymph nodes. Weinberg, et al., J. Immunol., 2000, 164, 2160-2169. It was shown in several tumor models in mice that engagement of the OX40-receptor in vivo during tumor priming significantly delayed and prevented the appearance of tumors as compared to control treated mice. Weinberg, et al., J. Immunol., 2000, 164, 2160-2169. Hence, it has been contemplated to enhance the immune response of a mammal to an antigen by engaging the OX40-receptor by administering an OX40-receptor binding agent (International Patent Application Publication No. WO 99/42585; Weinberg, et al., J. Immunol., 2000, 164, 2160-2169). Preclinical studies demonstrated that treatment of tumor bearing hosts with OX40 agonists, including both anti-OX40 mAb and OX40L-Fc fusion proteins, resulted in tumor regression in several preclinical models. Linch, et al., Front. Oncol. 2015, 34, 1-14.

[0012] In many solid tumors, the supportive microenvironment (which may make up the majority of the tumor mass) is a dynamic force that enables tumor survival. The tumor microenvironment is generally defined as a complex mixture of “cells, soluble factors, signaling molecules, extracellular matrices, and mechanical cues that promote neoplastic transformation, support tumor growth and invasion, protect the tumor from host immunity, foster therapeutic resistance, and provide niches for dominant metastases to thrive,” as described in Swartz, et aL, Cancer Res., 2012, 72, 2473. Although tumors express antigens that should be recognized by T cells, tumor clearance by the immune system is rare because of immune suppression by the microenvironment. Addressing the tumor cells themselves with e.g. chemotherapy has also proven to be insufficient to overcome the protective effects of the microenvironment. New approaches are thus urgently needed for more effective treatment of solid tumors that take into account the role of the microenvironment.

[0013] The CD20 antigen, also called human B-lymphocyte-restricted differentiation antigen Bp35, or B1, is found on the surface of normal “pre-B” and mature B lymphocytes, including malignant B lymphocytes. Nadler, et al., J. Clin. Invest. 1981, 67, 134-40; Stashenko, et al., J. Immunol. 1980, 139, 3260-85. The CD20 antigen is a glycosylated integral membrane protein with a molecular weight of approximately 35 kD. Tedder, et al., Proc. Natl. Acad. Sci. USA, 1988, 85, 208-12. CD20 is also expressed on most B cell non-Hodgkin's lymphoma cells, but is not found on hematopoietic stem cells, pro-B cells, normal plasma cells, or other normal tissues. Anti-CD20 antibodies are currently used as therapies for many B cell hematological malignancies, including indolent non-Hodgkin's lymphoma (NHL), aggressive NHL, and chronic lymphocytic leukemia (CLL)/small lymphocytic leukemia (SLL). Lim, et. al., Haematologica 2010, 95, 135-43; Beers, et. al., Sem. Hematol. 2010, 47, 107-14; Klein, et al., mAbs 2013, 5, 22-33. However, there is an urgent need to provide for more efficacious therapies in many B cell hematological malignancies.

[0014] The present invention provides the unexpected finding that the combination of a molecule selected from the group consisting of a GITR binding molecule, a 4-1BB agonist, an OX40 agonist, and combinations thereof and a BTK inhibitor is synergistically effective in the treatment of any of several types of cancers such as leukemia, lymphoma, and solid tumor cancers, as well as inflammatory, immune, and autoimmune disorders. The present invention also provides the unexpected finding that a combination of a molecule selected from the group consisting of a GITR binding molecule, a 4-1BB agonist, an OX40 agonist, and combinations thereof and a BTK inhibitor is synergistically effective in the treatment of any of several types of cancers such as leukemia, lymphoma, and solid tumor cancers, as well as inflammatory, immune, and autoimmune disorders. The present invention further provides the unexpected finding that the combination of an anti-CD20 antibody with a BTK inhibitor and a molecule selected from the group consisting of a GITR binding molecule, a 4-1BB agonist, an OX40 agonist, and combinations thereof is synergistically effective in the treatment of any of several types of cancers such as leukemia, lymphoma, and solid tumor cancers, as well as inflammatory, immune, and autoimmune disorders.

### SUMMARY OF THE INVENTION

[0015] In an embodiment, the invention provides a method of treating a hyperproliferative disease, comprising co-administering, to a mammal in need thereof, therapeutically effective amounts of (1) a molecule selected from the group consisting of a GITR binding molecule, a 4-1BB agonist, an OX40 agonist, and combinations thereof or fragments, derivatives, conjugates, variants, biosimilars, and combinations thereof, and (2) a Bruton's tyrosine kinase (BTK) inhibitor or a pharmaceutically acceptable salt, solvate, hydrate, cocrystal, or prodrug thereof. In an embodiment, the molecule selected from the group consisting of a GITR binding molecule, a 4-1BB agonist, an OX40 agonist, and combinations thereof is administered to the mammal before administration of the BTK inhibitor. In an embodiment, the molecule selected from the group consisting of a GITR binding molecule, a 4-1BB agonist, an OX40 agonist, and combinations thereof is administered to the mammal simultaneously with the administration of the BTK inhibitor. In an embodiment, the molecule selected from the group consisting of a GITR binding molecule, a 4-1BB agonist, an OX40 agonist, and combinations thereof is administered to the mammal after administration of the BTK inhibitor.

[0016] In an embodiment, the invention provides a method of treating a hyperproliferative disease, comprising co-administering, to a mammal in need thereof, therapeutically effective amounts of (1) a molecule selected from the group consisting of a GITR binding molecule, a 4-1BB agonist, an OX40 agonist, and combinations thereof or fragments, derivatives, conjugates, variants, biosimilars, and combinations thereof, and (2) a BTK inhibitor or a pharmaceutically acceptable salt, solvate, hydrate, cocrystal, or prodrug thereof.

[0017] In an embodiment, the invention provides a method of treating a hyperproliferative disease, comprising co-administering, to a mammal in need thereof, therapeutically effective amounts of (1) a molecule selected from the group consisting of a GITR binding molecule, a 4-1BB agonist, an OX40 agonist, and combinations thereof or fragments, derivatives, conjugates, variants, biosimilars, and combinations thereof, and (2) a BTK inhibitor or a pharmaceutically acceptable salt, solvate, hydrate, cocrystal, or prodrug thereof, wherein the BTK inhibitor is selected from the group consisting of:

[chemical structure]

[chemical structure]

and pharmaceutically-acceptable salts, cocrystals, hydrates, solvates, and prodrugs thereof.

[0018] In an embodiment, the invention provides a method of treating a hyperproliferative disease, comprising co-administering, to a mammal in need thereof, therapeutically effective amounts of (1) a molecule selected from the group consisting of a GITR binding molecule, a 4-1BB agonist, an OX40 agonist, and combinations thereof or fragments, derivatives, conjugates, variants, biosimilars, and combinations thereof, and (2) a Bruton's tyrosine kinase (BTK) inhibitor or a pharmaceutically acceptable salt, solvate, hydrate, cocrystal, or prodrug thereof, wherein the BTK inhibitor is selected from the group consisting of:

[chemical structure]

and pharmaceutically-acceptable salts, cocrystals, hydrates, solvates, and prodrugs thereof.

[0019] In an embodiment, the invention provides a method of treating a hyperproliferative disease, comprising co-administering, to a mammal in need thereof, therapeutically effective amounts of (1) a molecule selected from the group consisting of a GITR binding molecule, a 4-1BB agonist, an OX40 agonist, and combinations thereof or fragments, derivatives, conjugates, variants, biosimilars, and combinations thereof, and (2) a BTK inhibitor or a pharmaceutically acceptable salt, solvate, hydrate, cocrystal, or prodrug thereof, wherein the GITR binding molecule is selected from the group consisting of TRX518, 6C8, 36E5, 3D6, 61G6, 6H6, 61F6, 1D8, 17F10, 35D8, 49A1, 9E5, 31H6 and fragments, derivatives, conjugates, variants, biosimilars, and combinations thereof; wherein the 4-1BB agonist is selected from the group consisting of PF-05082566 (Pfizer), 1D8, 3Elor, 4B4 (BioLegend 309809), H4-1BB-M127 (BD Pharmingen 552532), BBK2 (Thermo Fisher MS621PABX), 145501 (Leinco Technologies B591), antibody produced by cell line deposited as ATCC No. HB-11248, 5F4 (BioLegend 31 1503), C65-485 (BD Pharmingen 559446), 20H4.9-IgG4 (1007 or BMS-663513 (urelumab)), 20H4.9-IgG1 (BMS-663031), 4E9, BMS-554271, BMS-469492, 3H3, BMS-469497, 3E1, 53A2, and 3B8, and fragments, derivatives, conjugates, variants, biosimilars, and combinations thereof; and wherein the OX40 agonist is selected from the group consisting of MEDI6469 (MedImmune), MEDI0562 (MedImmune), MEDI6383 (MedImmune), MOXR0916 (Genentech), GSK3174998, and fragments, derivatives, conjugates, variants, biosimilars, and combinations thereof.

[0020] In an embodiment, the invention provides a method of treating a hyperproliferative disease, comprising co-administering, to a mammal in need thereof, therapeutically effective amounts of (1) a molecule selected from the group consisting of a GITR binding molecule, a 4-1BB agonist, an OX40 agonist, and combinations thereof or fragments, derivatives, conjugates, variants, biosimilars, and combinations thereof, and (2) a BTK inhibitor or a pharmaceutically acceptable salt, solvate, hydrate, cocrystal, or prodrug thereof, further comprising the step of administering a therapeutically effective amount of an anti-CD20 antibody selected from the group consisting of rituximab, obinutuzumab, ofatumumab, veltuzumab, tositumomab, ibritumomab, and fragments, derivatives, conjugates, variants, radioisotope-labeled complexes, biosimilars thereof, and combinations thereof.

[0021] In an embodiment, the invention provides a method of treating a hyperproliferative disease, wherein the hyperproliferative disease is a cancer, comprising co-administering, to a mammal in need thereof, therapeutically effective amounts of (1) a molecule selected from the group consisting of a GITR binding molecule, a 4-1BB agonist, an OX40 agonist, and combinations thereof or fragments, derivatives, conjugates, variants, biosimilars, and combinations thereof, and (2) a Bruton's tyrosine kinase (BTK) inhibitor or a pharmaceutically acceptable salt, solvate, hydrate, cocrystal, or prodrug thereof, wherein the cancer is a B cell hematological malignancy, and wherein the B cell hematological malignancy is selected from the group consisting of chronic lymphocytic leukemia (CLL), small lymphocytic leukemia (SLL), non-Hodgkin's lymphoma (NHL), diffuse large B cell lymphoma (DLBCL), follicular lymphoma (FL), mantle cell lymphoma (MCL), Hodgkin's lymphoma, B cell acute lymphoblastic leukemia (B-ALL), Burkitt's lymphoma, Waldenstrom's macroglobulinemia (WM), Burkitt's lymphoma, multiple myeloma, and myelofibrosis. In an embodiment, the cancer is a solid tumor cancer, wherein the solid tumor cancer is selected from the group consisting of bladder cancer, non-small cell lung cancer, cervical cancer, anal cancer, pancreatic cancer, squamous cell carcinoma including head and neck cancer, renal cell carcinoma, melanoma, ovarian cancer, small cell lung cancer, glioblastoma, gastrointestinal stromal tumor, breast cancer, lung cancer, colorectal cancer, thyroid cancer, bone sarcoma, stomach cancer, oral cavity cancer, oropharyngeal cancer, gastric cancer, kidney cancer, liver cancer, prostate cancer, esophageal cancer, testicular cancer, gynecological cancer, colon cancer, and brain cancer.

[0022] In an embodiment, the invention provides a method of treating a hyperproliferative disease, comprising co-administering, to a mammal in need thereof, therapeutically effective amounts of (1) a molecule selected from the group consisting of a GITR binding molecule, a 4-1BB agonist, an OX40 agonist, and combinations thereof or fragments, derivatives, conjugates, variants, biosimilars, and combinations thereof, and (2) a Bruton's tyrosine kinase (BTK) inhibitor or a pharmaceutically acceptable salt, solvate, hydrate, cocrystal, or prodrug thereof, further comprising the step of administering a therapeutically effective amount of albumin-bound paclitaxel.

[0023] In an embodiment, the invention provides a method of treating a cancer in a human comprising the step of co-administering (1) a therapeutically effective amount of a molecule selected from the group consisting of a GITR binding molecule, a 4-1BB agonist, an OX40 agonist, and combinations thereof or fragments, derivatives, conjugates, variants, biosimilars, and combinations thereof, and (2) a therapeutically effective amount of a Bruton's tyrosine kinase (BTK) inhibitor or a pharmaceutically acceptable salt, solvate, hydrate, cocrystal, or prodrug thereof, wherein the therapeutically effective amount is effective to inhibit signaling between the tumor cells of the cancer and at least one tumor microenvironment selected from the group consisting of macrophages, monocytes, mast cells, helper T cells, cytotoxic T cells, regulatory T cells, natural killer cells, myeloid-derived suppressor cells, regulatory B cells, neutrophils, dendritic cells, and fibroblasts. In an embodiment, the cancer is a solid tumor cancer selected from the group consisting of bladder cancer, non-small cell lung cancer, cervical cancer, anal cancer, pancreatic cancer, squamous cell carcinoma including head and neck cancer, renal cell carcinoma, melanoma, ovarian cancer, small cell lung cancer, glioblastoma, gastrointestinal stromal tumor, breast cancer, lung cancer, colorectal cancer, thyroid cancer, bone sarcoma, stomach cancer, oral cavity cancer, oropharyngeal cancer, gastric cancer, kidney cancer, liver cancer, prostate cancer, esophageal cancer, testicular cancer, gynecological cancer, colon cancer, and brain cancer. In an embodiment, the BTK inhibitor is selected from the group consisting of:

[chemical structure]

[chemical structure]

and pharmaceutically-acceptable salts, cocrystals, hydrates, solvates, or prodrugs thereof. In an embodiment, the molecule selected from the group consisting of a GITR binding molecule, a 4-1BB agonist, an OX40 agonist, and combinations thereof is selected from the group consisting of TRX518, 6C8, 36E5, 3D6, 61G6, 6H6, 61F6, 1D8, 17F10, 35D8, 49A1, 9E5, 31H6 and fragments, derivatives, conjugates, variants, biosimilars, and combinations thereof.

[0024] In an embodiment, the invention provides a method of treating a cancer in a human intolerant to a bleeding event comprising the step of administering (1) a therapeutically effective amount of a molecule selected from the group consisting of a GITR binding molecule, a 4-1BB agonist, an OX40 agonist, and combinations thereof or fragments, derivatives, conjugates, variants, biosimilars, and combinations thereof, and (2) a therapeutically effective amount of a Bruton's tyrosine kinase (BTK) inhibitor or a pharmaceutically acceptable salt, solvate, hydrate, cocrystal, or prodrug thereof, wherein the BTK inhibitor is selected from the group consisting of:

[chemical structure]

[chemical structure]

and pharmaceutically-acceptable salts, cocrystals, hydrates, solvates, or prodrugs thereof. In an embodiment, the bleeding event is selected from the group consisting of subdural hematoma, gastrointestinal bleeding, hematuria, post-procedural hemorrhage, bruising, petechiae, and combinations thereof. In an embodiment, the GITR binding molecule is selected from the group consisting of TRX518, 6C8, 36E5, 3D6, 61G6, 6H6, 61F6, 1D8, 17F10, 35D8, 49A1, 9E5, 31H6 and fragments, derivatives, conjugates, variants, biosimilars, and combinations thereof. In an embodiment, the 4-1BB agonist is selected from the group consisting of PF-05082566 (Pfizer), 1D8, 3Elor, 4B4 (BioLegend 309809), H4-1BB-M127 (BD Pharmingen 552532), BBK2 (Thermo Fisher MS621PABX), 145501 (Leinco Technologies B591), antibody produced by cell line deposited as ATCC No. HB-11248, 5F4 (BioLegend 31 1503), C65-485 (BD Pharmingen 559446), 20H4.9-IgG4 (1007 or BMS-663513 (urelumab)), 20H4.9-IgG1 (BMS-663031), 4E9, BMS-554271, BMS-469492, 3H3, BMS-469497, 3E1, 53A2, and 3B8, and fragments, derivatives, conjugates, variants, biosimilars, and combinations thereof; and wherein the OX40 agonist is selected from the group consisting of MEDI6469 (MedImmune), MEDI0562 (MedImmune), MEDI6383 (MedImmune), MOXR0916 (Genentech), GSK3174998, and fragments, derivatives, conjugates, variants, biosimilars, and combinations thereof.

[0025] In an embodiment, the invention provides a method of treating a cancer in a human intolerant to a bleeding event comprising the step of administering (1) a therapeutically effective amount of a molecule selected from the group consisting of a GITR binding molecule, a 4-1BB agonist, an OX40 agonist, and combinations thereof or fragments, derivatives, conjugates, variants, biosimilars, and combinations thereof, and (2) a therapeutically effective amount of a Bruton's tyrosine kinase (BTK) inhibitor or a pharmaceutically acceptable salt, solvate, hydrate, cocrystal, or prodrug thereof, further comprising the step of administering a therapeutically effective amount of an anticoagulant or antiplatelet active pharmaceutical ingredient. In an embodiment, the anticoagulant or antiplatelet active pharmaceutical ingredient is selected from the group consisting of acenocoumarol, anagrelide, anagrelide hydrochloride, abciximab, aloxiprin, antithrombin, apixaban, argatroban, aspirin, aspirin with extended-release dipyridamole, beraprost, betrixaban, bivalirudin, carbasalate calcium, cilostazol, clopidogrel, clopidogrel bisulfate, cloricromen, dabigatran etexilate, darexaban, dalteparin, dalteparin sodium, defibrotide, dicumarol, diphenadione, dipyridamole, ditazole, desirudin, edoxaban, enoxaparin, enoxaparin sodium, eptifibatide, fondaparinux, fondaparinux sodium, heparin, heparin sodium, heparin calcium, idraparinux, idraparinux sodium, iloprost, indobufen, lepirudin, low molecular weight heparin, melagatran, nadroparin, otamixaban, parnaparin, phenindione, phenprocoumon, prasugrel, picotamide, prostacyclin, ramatroban, reviparin, rivaroxaban, sulodexide, terutroban, terutroban sodium, ticagrelor, ticlopidine, ticlopidine hydrochloride, tinzaparin, tinzaparin sodium, tirofiban, tirofiban hydrochloride, treprostinil, treprostinil sodium, triflusal, vorapaxar, warfarin, warfarin sodium, ximelagatran, salts thereof, solvates thereof, hydrates thereof, and combinations thereof. In an embodiment, the cancer is selected from the group consisting of bladder cancer, squamous cell carcinoma including head and neck cancer, pancreatic ductal adenocarcinoma (PDA), pancreatic cancer, colon carcinoma, mammary carcinoma, breast cancer, fibrosarcoma, mesothelioma, renal cell carcinoma, lung carcinoma, thyoma, prostate cancer, colorectal cancer, ovarian cancer, acute myeloid leukemia, thymus cancer, brain cancer, squamous cell cancer, skin cancer, eye cancer, retinoblastoma, melanoma, intraocular melanoma, oral cavity and oropharyngeal cancers, gastric cancer, stomach cancer, cervical cancer, renal cancer, kidney cancer, liver cancer, ovarian cancer, esophageal cancer, testicular cancer, gynecological cancer, thyroid cancer, acquired immune deficiency syndrome (AIDS)-related cancers (e.g., lymphoma and Kaposi's sarcoma), viral-induced cancer, glioblastoma, esophogeal tumors, hematological neoplasms, non-small-cell lung cancer, chronic myelocytic leukemia, diffuse large B-cell lymphoma, esophagus tumor, follicle center lymphoma, head and neck tumor, hepatitis C virus infection, hepatocellular carcinoma, Hodgkin's disease, metastatic colon cancer, multiple myeloma, non-Hodgkin's lymphoma, indolent non-Hogkin's lymphoma, ovary tumor, pancreas tumor, renal cell carcinoma, small-cell lung cancer, stage IV melanoma, chronic lymphocytic leukemia, B-cell acute lymphoblastic leukemia (ALL), mature B-cell ALL, follicular lymphoma, mantle cell lymphoma, Burkitt's lymphoma, and myelofibrosis.

[0026] In some embodiments, the invention provides a composition comprising therapeutically effective amounts of (1) a molecule selected from the group consisting of a GITR binding molecule, a 4-1BB agonist, an OX40 agonist, and combinations thereof or fragments, derivatives, conjugates, variants, biosimilars, and combinations thereof; and (2) a BTK inhibitor or a pharmaceutically acceptable salt, solvate, hydrate, cocrystal, or prodrug thereof, for use in the treatment of cancer. This composition is typically a pharmaceutical composition.

[0027] In some embodiments, the invention provides a composition comprising therapeutically effective amounts of (1) a molecule selected from the group consisting of a GITR binding molecule, a 4-1BB agonist, an OX40 agonist, and combinations thereof or fragments, derivatives, conjugates, variants, biosimilars, and combinations thereof; (2) a BTK inhibitor or a pharmaceutically acceptable salt, solvate, hydrate, cocrystal, or prodrug thereof, for use in the treatment of cancer; and (3) a therapeutically effective amount of an anti-CD20 antibody selected from the group consisting of rituximab, obinutuzumab, ofatumumab, veltuzumab, tositumomab, ibritumomab, and fragments, derivatives, conjugates, variants, radioisotope-labeled complexes, and biosimilars thereof. This composition is typically a pharmaceutical composition.

[0028] In some embodiments, the invention provides a method of treating leukemia, lymphoma or a solid tumor cancer in a subject, comprising co-administering to a mammal in need thereof any of the foregoing compositions.

[0029] In some embodiments, the invention provides a method of treating leukemia, lymphoma or a solid tumor cancer in a subject, comprising co-administering to a mammal in need thereof a therapeutically effective amount of a molecule selected from the group consisting of a GITR binding molecule, a 4-1BB agonist, an OX40 agonist, and combinations thereof and a BTK inhibitor.

[0030] In some embodiments, the invention provides a method of treating leukemia, lymphoma or a solid tumor cancer in a subject, comprising co-administering to a mammal in need thereof a therapeutically effective amount of a molecule selected from the group consisting of a GITR binding molecule, a 4-1BB agonist, an OX40 agonist, and combinations thereof, a BTK inhibitor, and an anti-CD20 antibody.

[0031] In some embodiments, the invention provides a method of treating leukemia, lymphoma or a solid tumor cancer in a subject, comprising co-administering to a mammal in need thereof a therapeutically effective amount of a molecule selected from the group consisting of a GITR binding molecule, a 4-1BB agonist, an OX40 agonist, and combinations thereof, a BTK inhibitor, and albumin-bound paclitaxel.

[0032] In some embodiments, the invention provides a method of treating leukemia, lymphoma or a solid tumor cancer in a subject, comprising co-administering to a mammal in need thereof a therapeutically effective amount of a molecule selected from the group consisting of a GITR binding molecule, a 4-1BB agonist, an OX40 agonist, and combinations thereof, a BTK inhibitor, and bendustamine.

[0033] In some embodiments, the invention provides a method of treating leukemia, lymphoma or a solid tumor cancer in a subject, comprising co-administering to a mammal in need thereof a therapeutically effective amount of a molecule selected from the group consisting of a GITR binding molecule, a 4-1BB agonist, an OX40 agonist, and combinations thereof, a BTK inhibitor, and a combination of cyclophosphamide, doxorubicin, vincristine, and prednisone (CHOP).

[0034] In some embodiments, the invention provides a method of treating leukemia, lymphoma or a solid tumor cancer in a subject, comprising co-administering to a mammal in need thereof a therapeutically effective amount of a molecule selected from the group consisting of a GITR binding molecule, a 4-1BB agonist, an OX40 agonist, and combinations thereof, a BTK inhibitor, and a combination of rituximab, cyclophosphamide, doxorubicin, vincristine, and prednisone (R-CHOP).

[0035] In some embodiments, the invention provides a method of treating leukemia, lymphoma or a solid tumor cancer in a subject, comprising co-administering to a mammal in need thereof a therapeutically effective amount of a molecule selected from the group consisting of a GITR binding molecule, a 4-1BB agonist, an OX40 agonist, and combinations thereof, a BTK inhibitor, and a combination of fludarabine, cyclophosphamide, and rituximab (FCR).

### BRIEF DESCRIPTION OF THE DRAWINGS

[0036] The foregoing summary, as well as the following detailed description of the invention, will be better understood when read in conjunction with the appended drawings.

[0037] FIG. 1 illustrates in vivo potency of Formula (2) (labeled “BTK inhibitor”) and Formula (10) (ibrutinib). Mice were gavaged at increasing drug concentration and sacrificed at one time point (3 hours post-dose). BCR is stimulated with IgM and the expression of activation markers CD69 and CD86 are monitored by flow cytometry to determine EC₅₀ values. The results show that Formula (2) is more potent at inhibiting expression of activation makers than Formula (10) (ibrutinib).

[0038] FIG. 2 illustrates in vitro potency in whole blood of Formula (2), Formula (10) (ibrutinib) and Formula (17) (CC-292) in inhibition of signals through the B cell receptor.

[0039] FIG. 3 illustrates EGF receptor phosphorylation in vitro for Formula (2) and Formula (10) (ibrutinib).

[0040] FIG. 4 illustrates tumor growth suppression in an orthotopic pancreatic cancer model. Mice were dosed orally with 15 mg/kg of the BTK inhibitor of Formula (2), 15 mg/kg of a phosphoinositide 3-kinase δ (PI3K-δ) inhibitor (denoted “p110d”), or a combination of both drugs. The statistical p-value (presumption against null hypothesis) is shown for each tested single active pharmaceutical ingredient and for the combination against the vehicle.

[0041] FIG. 5 illustrates the effects of oral dosing with 15 mg/kg of the BTK inhibitor of Formula (2), 15 mg/kg of a phosphoinositide 3-kinase δ (PI3K-δ) inhibitor (denoted “p110d”), or a combination of both inhibitors on myeloid tumor-associated macrophages (TAMs) in pancreatic tumor-bearing mice.

[0042] FIG. 6 illustrates the effects of oral dosing with 15 mg/kg of the BTK inhibitor of Formula (2), 15 mg/kg of a phosphoinositide 3-kinase δ (PI3K-δ) inhibitor (denoted “p110d”), or a combination of both inhibitors on myeloid-derived suppressor cells (MDSCs) in pancreatic tumor-bearing mice.

[0043] FIG. 7 illustrates the effects of oral dosing with 15 mg/kg of the BTK inhibitor of Formula (2), 15 mg/kg of a phosphoinositide 3-kinase δ (PI3K-δ) inhibitor, or a combination of both inhibitors on regulatory T cells (Tregs) in pancreatic tumor-bearing mice.

[0044] FIG. 8 illustrates the effects of vehicle on flux at two timepoints, as a control for comparison with FIG. 9, in the ID8 syngeneic orthotopic ovarian cancer model.

[0045] FIG. 9 illustrates the effects of the BTK inhibitor of Formula (2) on flux at two timepoints, for comparison with FIG. 8, in the ID8 syngeneic orthotopic ovarian cancer model.

[0046] FIG. 10 illustrates tumor response to treatment with the BTK inhibitor of Formula (2) correlates with a significant reduction in immunosuppressive tumor associated lymphocytes in tumor-bearing mice, in comparison to a control (vehicle).

[0047] FIG. 11 illustrates that treatment with the BTK inhibitor of Formula (2) impairs ID8 ovarian cancer growth in the syngeneic murine model in comparison to a control (vehicle).

[0048] FIG. 12 illustrates that treatment with the BTK inhibitor of Formula (2) induces a tumor response that correlates with a significant reduction in total B cells in tumor-bearing mice.

[0049] FIG. 13 illustrates that treatment with the BTK inhibitor of Formula (2) induces a tumor response that correlates with a significant reduction in B regulatory cells (Bregs) in tumor-bearing mice.

[0050] FIG. 14 illustrates that treatment with the BTK inhibitor of Formula (2) induces a tumor response that correlates with a significant reduction in immunosuppressive tumor associated Tregs.

[0051] FIG. 15 illustrates that treatment with the BTK inhibitor of Formula (2) induces a tumor response that correlates with an increase in CD8⁺ T cells.

[0052] FIG. 16 illustrates the effects of treatment with the active pharmaceutical ingredient of Formula (2) on tumor volumes in the KPC pancreatic cancer model.

[0053] FIG. 17 illustrates the results of analysis of tumor tissues showing that immunosuppressive TAMs (CD11b⁺Ly6ClowF4/80⁺Csf1r⁺) were significantly reduced with Formula (2) treatment in the KPC pancreatic cancer model.

[0054] FIG. 18 illustrates the results of analysis of tumor tissues showing that immunosuppressive MDSCs (Gr1⁺Ly6CHi) were significantly reduced with Formula (2) treatment in the KPC pancreatic cancer model.

[0055] FIG. 19 illustrates the results of analysis of tumor tissues showing that immunosuppressive Tregs (CD4⁺CD25⁺FoxP3⁺) were significantly reduced with Formula (2) treatment in the KPC pancreatic cancer model.

[0056] FIG. 20 illustrates that the decrease in immunosuppressive TAMs, MDSCs, and Tregs in the KPC pancreatic cancer model correlated with a significant increase in CD8⁺ cells.

[0057] FIG. 21 illustrates the dosing schema used with the KrasLA2 non-small cell lung cancer (NSCLC) model.

[0058] FIG. 22 illustrates tumor volume variation from baseline as assessed by microcomputerized tomography (microCT) in the KrasL2 NSCLC model.

[0059] FIG. 23 illustrates TAMs in the KrasL2 NSCLC model, and indicates that Formula (2) induces a tumor response that correlates with a significant reduction in immunosuppressive tumor associated TAMs.

[0060] FIG. 24 illustrates MDSCs in the KrasL2 NSCLC model, and indicates that Formula (2) induces a tumor response that correlates with a significant reduction in immunosuppressive tumor associated MDSCs.

[0061] FIG. 25 illustrates Tregs in the KrasL2 NSCLC model, and indicates that Formula (2) induces a tumor response that correlates with a significant reduction in immunosuppressive tumor associated Tregs.

[0062] FIG. 26 illustrates CD8⁺ T cells in the KrasL2 NSCLC model.

[0063] FIG. 27 illustrates BTK inhibitory effects on MDSCs.

[0064] FIG. 28 shows in vitro analysis of antibody-dependent NK cell-mediated interferon-γ (IFN-γ) release with BTK inhibitors. To evaluate NK cell function, purified NK cells were isolated from healthy peripheral blood mononuclear cells and cultured with 0.1 or 1 μM of Formula (10) (ibrutinib) or 1 μM of Formula (2) for 4 hours together with rituximab-coated (10 μg/mL) lymphoma cells, DHL4, or trastuzumab-coated (10 μg/mL) HER2+ breast cancer cells, HER18, and supernatant was harvested and analyzed by enzyme-linked immunosorbent assay for IFN-γ. All in vitro experiments were performed in triplicate. Labels are defined as follows: *p=0.018, **p=0.002, ***p=0.001.

[0065] FIG. 29 shows in vitro analysis of antibody-dependent NK cell-mediated degranulation with BTK inhibitors. To evaluate NK cell function, purified NK cells were isolated from healthy peripheral blood mononuclear cells and cultured with 0.1 or 1 μM of Formula (10) (ibrutinib) or 1 μM of Formula (2) for 4 hours together with rituximab-coated (10 μg/mL) lymphoma cells, DHL4, or trastuzumab-coated (10 μg/mL) HER2⁺ breast cancer cells, HER18, and NK cells isolated and analyzed for degranulation by flow cytometry for CD107a⁺ mobilization. All in vitro experiments were performed in triplicate. Labels are defined as follows: *p=0.01, **p=0.002, ***p=0.003, ****p=0.0005.

[0066] FIG. 30 shows that Formula (10) (ibrutinib) antagonizes antibody-dependent NK cell-mediated cytotoxicity using the Raji cell line. NK cell cytotoxicity as percent lysis of tumor cells was analyzed in chromium release assays with purified NK cells incubated with chromium-labeled Raji for 4 hours at variable rituximab concentrations at a constant effector:target ratio of 25:1 and Formula (10) (ibrutinib) (1 μM), Formula (2) (1 μM), or other interleukin-2 inducible tyrosine kinase (ITK) sparing BTK inhibitors CGI-1746, inhibA (1 μM) and BGB-3111 (“inhibB,” 1 μM). All in vitro experiments were performed in triplicate. Labels are defined as follows: *p=0.001.

[0067] FIG. 31 shows that Formula (10) (ibrutinib) antagonizes antibody-dependent NK cell-mediated cytotoxicity in primary CLL cells. NK cell cytotoxicity as percent lysis of tumor cells was analyzed in chromium release assays with purified NK cells incubated with chromium-labeled Raji for 4 hours at variable rituximab concentrations at a constant effector:target ratio of 25:1 and Formula (10) (ibrutinib) (1 μM), Formula (2) (1 μM), or other ITK sparing BTK inhibitors CGI-1746, inhibA (1 μM) and BGB-3111 (“inhibB,” 1 μM). All in vitro experiments were performed in triplicate. Labels are defined as follows: *p=0.001.

[0068] FIG. 32 shows a summary of the results given in FIG. 31 at the highest concentration of rituximab (“Ab”) (10 μg/mL).

[0069] FIG. 33 shows NK cell degranulation results for combinations of obinutuzumab with Formula (2) and Formula (10). The percentage of CD56⁺/CD107a⁺ NK cells observed in whole blood after pretreatment for 1 hour with the BTK inhibitors and stimulation with MEC-1 cells opsonised with obinutuzumab at 1 μg/mL for 4 hours (n=3) is shown.

[0070] FIG. 34 shows the effects of BTK inhibition on generalized NK cell mediated cytotoxicity.

[0071] FIG. 35 shows that Formula (2) has no adverse effect on T helper 17 (Th17) cells, which are a subset of T helper cells that produce interleukin 17 (IL-17), while Formula (10) (ibrutinib) strongly inhibits Th17 cells.

[0072] FIG. 36 shows that Formula (2) has no effect on regulatory T cell (Treg) development, while Formula (10) (ibrutinib) strongly increases Treg development.

[0073] FIG. 37 shows that Formula (2) has no effect on CD8⁺ T cell viability, development, while Formula (10) (ibrutinib) strongly affects CD8⁺ T cell viability at higher doses.

[0074] FIG. 38 illustrates the results of the cytotoxicity assay for CD8⁺ T cell function. Formula (10) (ibrutinib) affects CD8⁺ T cell function as measured by % cytotoxicity, while Formula (2) has no effect on CD8⁺ T cell function as measured by % cytotoxicity relative to vehicle.

[0075] FIG. 39 illustrates the results of IFN-γ level measurements for CD8⁺ T cell function. Formula (10) (ibrutinib) affects CD8⁺ T cell function as measured by IFN-γ level, while Formula (2) has no effect on CD8⁺ T cell function as measured by IFN-γ level relative to vehicle.

[0076] FIG. 40 illustrates the results of the clinical study of Formula (2) (labeled “BTK inhibitor”) in CLL, which are shown in comparison to the results reported for Formula (10) (ibrutinib) in FIG. 1A of Byrd, et al., N. Engl. J. Med. 2013, 369, 32-42. The results show that the BTK inhibitor of Formula (2) causes a much smaller relative increase and much faster decrease in absolute lymphocyte count (ALC) relative to the BTK inhibitor of Formula (10) (ibrutinib). The sum of the product of greatest diameters (SPD) also decreases more rapidly during treatment with the BTK inhibitor than with the BTK inhibitor of Formula (10) (ibrutinib).

[0077] FIG. 41 shows SPD of enlarged lymph nodes in CLL patients as a function of dose (cohort) of the BTK inhibitor of Formula (2).

[0078] FIG. 42 shows a comparison of progression-free survival (PFS) in CLL patients treated with the BTK inhibitor of Formula (10) (ibrutinib) or the BTK inhibitor of Formula (2). The ibrutinib data is taken from Byrd, et al., N. Engl. J. Med. 2013, 369, 32-42. CLL patients treated with Formula (2) for at least 8 days are included.

[0079] FIG. 43 shows a comparison of number of patients at risk in CLL patients treated with the BTK inhibitor of Formula (10) (ibrutinib) or the BTK inhibitor of Formula (2). CLL patients treated with Formula (2) for at least 8 days are included.

[0080] FIG. 44 shows a comparison of progression-free survival (PFS) in CLL patients exhibiting the 17p deletion and treated with the BTK inhibitor of Formula (10) (ibrutinib) or the BTK inhibitor of Formula (2). The ibrutinib data is taken from Byrd, et al., N. Engl. J. Med. 2013, 369, 32-42.

[0081] FIG. 45 shows a comparison of number of patients at risk in CLL patients exhibiting the 17p deletion and treated with the BTK inhibitor of Formula (10) (ibrutinib) or the BTK inhibitor of Formula (2). The ibrutinib data is taken from Byrd, et al., N. Engl. J. Med. 2013, 369, 32-42. CLL patients treated with Formula (2) for at least 8 days are included.

[0082] FIG. 46 shows improved BTK target occupancy of Formula (2) at lower dosage versus Formula (10) (ibrutinib) in relapsed/refractory CLL patients.

[0083] FIG. 47 shows the % change in myeloid-derived suppressor cell (MDSC) (monocytic) level over 28 days versus % ALC change at Cycle 1, day 28 (C1D28) with trendlines.

[0084] FIG. 48 shows the % change in MDSC (monocytic) level over 28 days versus % ALC change at Cycle 2, day 28 (C2D28) with trendlines.

[0085] FIG. 49 shows the % change in natural killer (NK) cell level over 28 days versus % ALC change at Cycle 1, day 28 (C2D28) with trendlines.

[0086] FIG. 50 shows the % change in NK cell level over 28 days versus % ALC change at Cycle 2, day 28 (C2D28) with trendlines.

[0087] FIG. 51 compares the % change in MDSC (monocytic) level and % change in NK cell level over 28 days versus % ALC change with the % change in level of CD4⁺ T cells, CD8⁺ T cells, CD4⁺/CD8⁺ T cell ratio, NK-T cells, PD-1⁺ CD4⁺ T cells, and PD-1⁺ CD8⁺ T cells, also versus % ALC change, at Cycle 1 day 28 (C1D28). Trendlines are shown for % change in MDSC (monocytic) level and % change in NK cell level.

[0088] FIG. 52 compares the % change in MDSC (monocytic) level and % change in NK cell level over 28 days versus % ALC change with the % change in level of CD4⁺ T cells, CD8⁺ T cells, CD4⁺/CD8⁺ T cell ratio, NK-T cells, PD-1⁺ CD4⁺ T cells, and PD-1⁺ CD8⁺ T cells, also versus % ALC change, at Cycle 2 day 28 (C2D28). Trendlines are shown for % change in MDSC (monocytic) level and % change in NK cell level.

[0089] FIG. 53 shows updated the results of the clinical study of Formula (2) (labeled “BTK inhibitor”) in CLL, which are shown in comparison to the results reported for ibrutinib in FIG. 1A of Byrd, et al., N Engl. J. Med. 2013, 369, 32-42. The results show that the BTK inhibitor of Formula (2) causes a much smaller relative increase and much faster decrease in absolute lymphocyte count (ALC) relative to the BTK inhibitor of Formula (10) (ibrutinib). The sum of the product of greatest diameters (SPD) also decreases more rapidly during treatment with the BTK inhibitor than with the BTK inhibitor of Formula (10) (ibrutinib).

[0090] FIG. 54 shows improved BTK target occupancy of Formula (2) at lower dosage versus ibrutinib in relapsed/refractory CLL patients, and includes BID dosing results.

[0091] FIG. 55 illustrates PFS for patients with 17p deletion.

[0092] FIG. 56 illustrates PFS across relapsed/refractory patients with 17p deletion and with 11q deletion and no 17p deletion.

[0093] FIG. 57 illustrates PFS for patients with 11q deletion and no 17p deletion.

[0094] FIG. 58 illustrates updated SPD results from the clinical study of Formula (2) in relapsed/refractory CLL patients.

[0095] FIG. 59 illustrates that treatment of CLL patients with Formula (2) resulted in increased apoptosis.

[0096] FIG. 60 illustrates a decrease in CXCL12 levels observed in patients treated with Formula (2).

[0097] FIG. 61 illustrates a decrease in CCL2 levels observed in patients treated with Formula (2).

[0098] FIG. 62 illustrates representative photomicrographs and comparison of maximal thrombus size in laser injured arterioles of VWF HA1 mutant mice infused with human platelets in the absence or presence of various BTK inhibitors. Representative photomicrographs are given as a comparison of maximal thrombus size in laser-injured arterioles (1 μM concentrations shown).

[0099] FIG. 63 illustrates a quantitative comparison obtained by in vivo analysis of early thrombus dynamics in a humanized mouse laser injury model using three BTK inhibitors at a concentration 1 μM.

[0100] FIG. 64 illustrates the effect of the tested BTK inhibitors on thrombus formation. The conditions used were N=4, 3 mice per drug; anti-clotting active pharmaceutical ingredients <2000 μM². In studies with Formula (10) (ibrutinib), 48% MCL bleeding events were observed with 560 mg QD and 63% CLL bleeding events were observed with 420 mg QD, where bleeding event is defined as subdural hematoma, ecchymoses, GI bleeding, or hematuria.

[0101] FIG. 65 illustrates the effect of the concentration of the tested BTK inhibitors on thrombus formation.

[0102] FIG. 66 illustrates the results of GPVI platelet aggregation studies of Formula (2) (IC50=1.15 μM) and Formula (10) (ibrutinib, IC50=0.13 μM).

[0103] FIG. 67 illustrates the results of GPVI platelet aggregation studies of Formula (2) and Formula (10) (ibrutinib).

[0104] FIG. 68 illustrates tumor volume results in the CT26 model for mice treated with Formula (2) alone, anti-4-1BB agonistic monoclonal antibody alone (“Anti-4-1BB”), and a combination of Formula (2) and anti-4-1BB agonistic monoclonal antibody, shown in comparison to vehicle as a control.

[0105] FIG. 69 illustrates luminescence results obtained from the KPC mouse model study comparing vehicle, Formula (2), OX40 agonistic antibody, and a combination of Formula (2) and the OX40 agonistic antibody.

[0106] FIG. 70 illustrates tumor volumes obtained from the KPC mouse model study comparing vehicle, Formula (2), OX40 agonistic antibody, and a combination of Formula (2) and the OX40 agonistic antibody, also including the study arm combining Formula (2) and anti-PD-1 antibody.

[0107] FIG. 71 illustrates survival results obtained from the KPC mouse model study comparing vehicle, Formula (2), OX40 agonistic antibody, and a combination of Formula (2) and the OX40 agonistic antibody, also including the study arm combining Formula (2) and anti-PD-1 antibody.

[0108] FIG. 72 illustrates tumor volumes obtained from the PancO2 mouse model study comparing vehicle, Formula (2), OX40 agonistic antibody, and a combination of Formula (2) and the OX40 agonistic antibody, also including the study arm combining Formula (2) and anti-PD-1 antibody.

[0109] FIG. 73 illustrates survival results obtained from the PancO2 mouse model study comparing vehicle, Formula (2), OX40 agonistic antibody, and a combination of Formula (2) and the OX40 agonistic antibody, also including the study arm combining Formula (2) and anti-PD-1 antibody.

### BRIEF DESCRIPTION OF THE SEQUENCE LISTING

[0110] SEQ ID NO:1 is the amino acid sequence of human GITR (human tumor necrosis factor receptor superfamily member 18 (TNFRSF18) protein).

[0111] SEQ ID NO:2 is the amino acid sequence of murine GITR (murine tumor necrosis factor receptor superfamily member 18 (TNFRSF18) protein).

[0112] SEQ ID NO:3 is the amino acid sequence of the heavy chain variant HuN6C8 (glycosylated) of the 6C8 humanized monoclonal antibody, with an N (asparagine) in CDR2, corresponding to SEQ ID NO:60 in U.S. Pat. No. 7,812,135.

[0113] SEQ ID NO:4 is the amino acid sequence of the heavy chain variant HuN6C8 (aglycosylated) of the 6C8 humanized monoclonal antibody, with an N (asparagine) in CDR2, corresponding to SEQ ID NO:61 in U.S. Pat. No. 7,812,135.

[0114] SEQ ID NO:5 is the amino acid sequence of the heavy chain variant HuQ6C8 (glycosylated) of the 6C8 humanized monoclonal antibody, with an Q (glutamine) in CDR2, corresponding to SEQ ID NO:62 in U.S. Pat. No. 7,812,135.

[0115] SEQ ID NO:6 is the amino acid sequence of the heavy chain variant HuQ6C8 (aglycosylated) of the 6C8 humanized monoclonal antibody, with an Q (glutamine) in CDR2, corresponding to SEQ ID NO:63 in U.S. Pat. No. 7,812,135.

[0116] SEQ ID NO:7 is the amino acid sequence of the light chain of the 6C8 humanized monoclonal antibody, corresponding to SEQ ID NO:58 in U.S. Pat. No. 7,812,135.

[0117] SEQ ID NO:8 is the amino acid sequence of the leader sequence that may optionally be included with the amino acid sequence of SEQ ID NO:3, SEQ ID NO:4, SEQ ID NO:5, or SEQ ID NO:6.

[0118] SEQ ID NO:9 is the amino acid sequence of the leader sequence that may optionally be included with the amino acid sequence of SEQ ID NO:7.

[0119] SEQ ID NO:10 is the amino acid sequence of a heavy chain variable region of the 6C8 humanized monoclonal antibody, corresponding to SEQ ID NO:1 in U.S. Pat. No. 7,812,135. This sequence includes the leader sequence of SEQ ID NO:8.

[0120] SEQ ID NO:11 is the amino acid sequence of a heavy chain variable region of the 6C8 humanized monoclonal antibody, corresponding to SEQ ID NO:66 in U.S. Pat. No. 7,812,135. This sequence includes the leader sequence of SEQ ID NO:8.

[0121] SEQ ID NO:12 is the amino acid sequence of a light chain variable region of the 6C8 humanized monoclonal antibody, corresponding to SEQ ID NO:2 in U.S. Pat. No. 7,812,135. This sequence includes the leader sequence of SEQ ID NO:9.

[0122] SEQ ID NO:13 is the amino acid sequence of a heavy chain CDR1 region of the 6C8 humanized monoclonal antibody, corresponding to SEQ ID NO:3 in U.S. Pat. No. 7,812,135.

[0123] SEQ ID NO:14 is the amino acid sequence of a heavy chain CDR2 region of the 6C8 humanized monoclonal antibody, corresponding to SEQ ID NO:4 in U.S. Pat. No. 7,812,135.

[0124] SEQ ID NO:15 is the amino acid sequence of a heavy chain CDR2 region of the 6C8 humanized monoclonal antibody, corresponding to SEQ ID NO:19 in U.S. Pat. No. 7,812,135.

[0125] SEQ ID NO:16 is the amino acid sequence of a heavy chain CDR3 region of the 6C8 humanized monoclonal antibody, corresponding to SEQ ID NO:5 in U.S. Pat. No. 7,812,135.

[0126] SEQ ID NO:17 is the amino acid sequence of a heavy chain CDR1 region of the 6C8 humanized monoclonal antibody, corresponding to SEQ ID NO:6 in U.S. Pat. No. 7,812,135.

[0127] SEQ ID NO:18 is the amino acid sequence of a heavy chain CDR2 region of the 6C8 humanized monoclonal antibody, corresponding to SEQ ID NO:7 in U.S. Pat. No. 7,812,135.

[0128] SEQ ID NO:19 is the amino acid sequence of a heavy chain CDR3 region of the 6C8 humanized monoclonal antibody, corresponding to SEQ ID NO:8 in U.S. Pat. No. 7,812,135.

[0129] SEQ ID NO:20 is the amino acid sequence of the heavy chain variant HuN6C8 (glycosylated) of the 6C8 chimeric monoclonal antibody, with an N (asparagine) in CDR2, corresponding to SEQ ID NO:23 in U.S. Pat. No. 7,812,135.

[0130] SEQ ID NO:21 is the amino acid sequence of the heavy chain variant HuQ6C8 (aglycosylated) of the 6C8 chimeric monoclonal antibody, with an Q (glutamine) in CDR2, corresponding to SEQ ID NO:24 in U.S. Pat. No. 7,812,135.

[0131] SEQ ID NO:22 is the amino acid sequence of the light chain of the 6C8 chimeric monoclonal antibody, corresponding to SEQ ID NO:22 in U.S. Pat. No. 7,812,135.

[0132] SEQ ID NO:23 is the amino acid sequence of the 36E5 heavy chain variable region from U.S. Pat. No. 8,709,424.

[0133] SEQ ID NO:24 is the amino acid sequence of the 3D6 heavy chain variable region from U.S. Pat. No. 8,709,424.

[0134] SEQ ID NO:25 is the amino acid sequence of the 61G6 heavy chain variable region from U.S. Pat. No. 8,709,424.

[0135] SEQ ID NO:26 is the amino acid sequence of the 6H6 heavy chain variable region from U.S. Pat. No. 8,709,424.

[0136] SEQ ID NO:27 is the amino acid sequence of the 61F6 heavy chain variable region from U.S. Pat. No. 8,709,424.

[0137] SEQ ID NO:28 is the amino acid sequence of the 1D8 heavy chain variable region from U.S. Pat. No. 8,709,424.

[0138] SEQ ID NO:29 is the amino acid sequence of the 17F10 heavy chain variable region from U.S. Pat. No. 8,709,424.

[0139] SEQ ID NO:30 is the amino acid sequence of the 35D8 heavy chain variable region from U.S. Pat. No. 8,709,424.

[0140] SEQ ID NO:31 is the amino acid sequence of the 49A1 heavy chain variable region from U.S. Pat. No. 8,709,424.

[0141] SEQ ID NO:32 is the amino acid sequence of the 9E5 heavy chain variable region from U.S. Pat. No. 8,709,424.

[0142] SEQ ID NO:33 is the amino acid sequence of the 31H6 heavy chain variable region from U.S. Pat. No. 8,709,424.

[0143] SEQ ID NO:34 is the amino acid sequence of the 36E5 light chain variable region from U.S. Pat. No. 8,709,424.

[0144] SEQ ID NO:35 is the amino acid sequence of the 3D6 light chain variable region from U.S. Pat. No. 8,709,424.

[0145] SEQ ID NO:36 is the amino acid sequence of the 61G6 light chain variable region from U.S. Pat. No. 8,709,424.

[0146] SEQ ID NO:37 is the amino acid sequence of the 6H6 light chain variable region from U.S. Pat. No. 8,709,424.

[0147] SEQ ID NO:38 is the amino acid sequence of the 61F6 light chain variable region from U.S. Pat. No. 8,709,424.

[0148] SEQ ID NO:39 is the amino acid sequence of the 1D8 light chain variable region from U.S. Pat. No. 8,709,424.

[0149] SEQ ID NO:40 is the amino acid sequence of the 17F10 light chain variable region from U.S. Pat. No. 8,709,424.

[0150] SEQ ID NO:41 is the amino acid sequence of the 35D8 light chain variable region from U.S. Pat. No. 8,709,424.

[0151] SEQ ID NO:42 is the amino acid sequence of the 49A1 light chain variable region from U.S. Pat. No. 8,709,424.

[0152] SEQ ID NO:43 is the amino acid sequence of the 9E5 light chain variable region from U.S. Pat. No. 8,709,424.

[0153] SEQ ID NO:44 is the amino acid sequence of the 31H6 light chain variable region from U.S. Pat. No. 8,709,424.

[0154] SEQ ID NO:45 is the amino acid sequence of the humanized 1D8 heavy chain variable region from U.S. Pat. No. 8,709,424.

[0155] SEQ ID NO:46 is the amino acid sequence of the humanized 1D8 light chain variable region from U.S. Pat. No. 8,709,424.

[0156] SEQ ID NO:47 is the amino acid sequence of the humanized 3D6 heavy chain variable region from U.S. Pat. No. 8,709,424.

[0157] SEQ ID NO:48 is the amino acid sequence of the humanized 3D6 light chain variable region from U.S. Pat. No. 8,709,424.

[0158] SEQ ID NO:49 is the amino acid sequence of the humanized 6H6 heavy chain variable region from U.S. Pat. No. 8,709,424.

[0159] SEQ ID NO:50 is the amino acid sequence of the humanized 6H6 light chain variable region from U.S. Pat. No. 8,709,424.

[0160] SEQ ID NO:51 is the amino acid sequence of the humanized 9E5 heavy chain variable region from U.S. Pat. No. 8,709,424.

[0161] SEQ ID NO:52 is the amino acid sequence of the humanized 9E5 light chain variable region from U.S. Pat. No. 8,709,424.

[0162] SEQ ID NO:53 is the amino acid sequence of the humanized 31H6 heavy chain variable region from U.S. Pat. No. 8,709,424.

[0163] SEQ ID NO:54 is the amino acid sequence of the humanized 31H6 light chain variable region from U.S. Pat. No. 8,709,424.

[0164] SEQ ID NO:55 is the amino acid sequence of the humanized 17F10 heavy chain variable region from U.S. Pat. No. 8,709,424.

[0165] SEQ ID NO:56 is the amino acid sequence of the humanized 17F10 light chain variable region from U.S. Pat. No. 8,709,424.

[0166] SEQ ID NO:57 is the amino acid sequence of the humanized 35D8 heavy chain variable region from U.S. Pat. No. 8,709,424.

[0167] SEQ ID NO:58 is the amino acid sequence of the humanized 35D8 light chain variable region from U.S. Pat. No. 8,709,424.

[0168] SEQ ID NO:59 is the amino acid sequence of the humanized 36E5 heavy chain variable region from U.S. Pat. No. 8,709,424.

[0169] SEQ ID NO:60 is the amino acid sequence of the humanized 36E5 light chain variable region from U.S. Pat. No. 8,709,424.

[0170] SEQ ID NO:61 is the amino acid sequence of the humanized 49A1 heavy chain variable region from U.S. Pat. No. 8,709,424.

[0171] SEQ ID NO:62 is the amino acid sequence of the humanized 49A1 light chain variable region from U.S. Pat. No. 8,709,424.

[0172] SEQ ID NO:63 is the amino acid sequence of the humanized 61F6 heavy chain variable region from U.S. Pat. No. 8,709,424.

[0173] SEQ ID NO:64 is the amino acid sequence of the humanized 61F6 light chain variable region from U.S. Pat. No. 8,709,424.

[0174] SEQ ID NO:65 is the amino acid sequence of the humanized 61G6 heavy chain variable region from U.S. Pat. No. 8,709,424.

[0175] SEQ ID NO:66 is the amino acid sequence of the humanized 61G6 light chain variable region from U.S. Pat. No. 8,709,424.

[0176] SEQ ID NO:67 is the amino acid sequence of the 36E5 heavy chain CDR1 from U.S. Pat. No. 8,709,424.

[0177] SEQ ID NO:68 is the amino acid sequence of the 3D6 heavy chain CDR1 from U.S. Pat. No. 8,709,424.

[0178] SEQ ID NO:69 is the amino acid sequence of the 61G6 heavy chain CDR1 from U.S. Pat. No. 8,709,424.

[0179] SEQ ID NO:70 is the amino acid sequence of the 6H6 heavy chain CDR1 from U.S. Pat. No. 8,709,424.

[0180] SEQ ID NO:71 is the amino acid sequence of the 61F6 heavy chain CDR1 from U.S. Pat. No. 8,709,424.

[0181] SEQ ID NO:72 is the amino acid sequence of the 1D8 heavy chain CDR1 from U.S. Pat. No. 8,709,424.

[0182] SEQ ID NO:73 is the amino acid sequence of the 17F10 heavy chain CDR1 from U.S. Pat. No. 8,709,424.

[0183] SEQ ID NO:74 is the amino acid sequence of the 35D8 heavy chain CDR1 from U.S. Pat. No. 8,709,424.

[0184] SEQ ID NO:75 is the amino acid sequence of the 49A1 heavy chain CDR1 from U.S. Pat. No. 8,709,424.

[0185] SEQ ID NO:76 is the amino acid sequence of the 9E5 heavy chain CDR1 from U.S. Pat. No. 8,709,424.

[0186] SEQ ID NO:77 is the amino acid sequence of the 31H6 heavy chain CDR1 from U.S. Pat. No. 8,709,424.

[0187] SEQ ID NO:78 is the amino acid sequence of the 36E5 heavy chain CDR2 from U.S. Pat. No. 8,709,424.

[0188] SEQ ID NO:79 is the amino acid sequence of the 3D6 heavy chain CDR2 from U.S. Pat. No. 8,709,424.

[0189] SEQ ID NO:80 is the amino acid sequence of the 61G6 heavy chain CDR2 from U.S. Pat. No. 8,709,424.

[0190] SEQ ID NO:81 is the amino acid sequence of the 6H6 heavy chain CDR2 from U.S. Pat. No. 8,709,424.

[0191] SEQ ID NO:82 is the amino acid sequence of the 61F6 heavy chain CDR2 from U.S. Pat. No. 8,709,424.

[0192] SEQ ID NO:83 is the amino acid sequence of the 1D8 heavy chain CDR2 from U.S. Pat. No. 8,709,424.

[0193] SEQ ID NO:84 is the amino acid sequence of the 17F10 heavy chain CDR2 from U.S. Pat. No. 8,709,424.

[0194] SEQ ID NO:85 is the amino acid sequence of the 35D8 heavy chain CDR2 from U.S. Pat. No. 8,709,424.

[0195] SEQ ID NO:86 is the amino acid sequence of the 49A1 heavy chain CDR2 from U.S. Pat. No. 8,709,424.

[0196] SEQ ID NO:87 is the amino acid sequence of the 9E5 heavy chain CDR2 from U.S. Pat. No. 8,709,424.

[0197] SEQ ID NO:88 is the amino acid sequence of the 31H6 heavy chain CDR2 from U.S. Pat. No. 8,709,424.

[0198] SEQ ID NO:89 is the amino acid sequence of the 36E5 heavy chain CDR3 from U.S. Pat. No. 8,709,424.

[0199] SEQ ID NO:90 is the amino acid sequence of the 3D6 heavy chain CDR3 from U.S. Pat. No. 8,709,424.

[0200] SEQ ID NO:91 is the amino acid sequence of the 61G6 heavy chain CDR3 from U.S. Pat. No. 8,709,424.

[0201] SEQ ID NO:92 is the amino acid sequence of the 6H6 heavy chain CDR3 from U.S. Pat. No. 8,709,424.

[0202] SEQ ID NO:93 is the amino acid sequence of the 61F6 heavy chain CDR3 from U.S. Pat. No. 8,709,424.

[0203] SEQ ID NO:94 is the amino acid sequence of the 1D8 heavy chain CDR3 from U.S. Pat. No. 8,709,424.

[0204] SEQ ID NO:95 is the amino acid sequence of the 17F10 heavy chain CDR3 from U.S. Pat. No. 8,709,424.

[0205] SEQ ID NO:96 is the amino acid sequence of the 35D8 heavy chain CDR3 from U.S. Pat. No. 8,709,424.

[0206] SEQ ID NO:97 is the amino acid sequence of the 49A1 heavy chain CDR3 from U.S. Pat. No. 8,709,424.

[0207] SEQ ID NO:98 is the amino acid sequence of the 9E5 heavy chain CDR3 from U.S. Pat. No. 8,709,424.

[0208] SEQ ID NO:99 is the amino acid sequence of the 31H6 heavy chain CDR3 from U.S. Pat. No. 8,709,424.

[0209] SEQ ID NO:100 is the amino acid sequence of the 36E5 light chain CDR1 from U.S. Pat. No. 8,709,424.

[0210] SEQ ID NO:101 is the amino acid sequence of the 3D6 light chain CDR1 from U.S. Pat. No. 8,709,424.

[0211] SEQ ID NO:102 is the amino acid sequence of the 61G6 light chain CDR1 from U.S. Pat. No. 8,709,424.

[0212] SEQ ID NO:103 is the amino acid sequence of the 6H6 light chain CDR1 from U.S. Pat. No. 8,709,424.

[0213] SEQ ID NO:104 is the amino acid sequence of the 61F6 light chain CDR1 from U.S. Pat. No. 8,709,424.

[0214] SEQ ID NO:105 is the amino acid sequence of the 1D8 light chain CDR1 from U.S. Pat. No. 8,709,424.

[0215] SEQ ID NO:106 is the amino acid sequence of the 17F10 light chain CDR1 from U.S. Pat. No. 8,709,424.

[0216] SEQ ID NO:107 is the amino acid sequence of the 35D8 light chain CDR1 from U.S. Pat. No. 8,709,424.

[0217] SEQ ID NO:108 is the amino acid sequence of the 49A1 light chain CDR1 from U.S. Pat. No. 8,709,424.

[0218] SEQ ID NO:109 is the amino acid sequence of the 9E5 light chain CDR1 from U.S. Pat. No. 8,709,424.

[0219] SEQ ID NO:110 is the amino acid sequence of the 31H6 light chain CDR1 from U.S. Pat. No. 8,709,424.

[0220] SEQ ID NO:111 is the amino acid sequence of the 36E5 light chain CDR2 from U.S. Pat. No. 8,709,424.

[0221] SEQ ID NO:112 is the amino acid sequence of the 3D6 light chain CDR2 from U.S. Pat. No. 8,709,424.

[0222] SEQ ID NO:113 is the amino acid sequence of the 61G6 light chain CDR2 from U.S. Pat. No. 8,709,424.

[0223] SEQ ID NO:114 is the amino acid sequence of the 6H6 light chain CDR2 from U.S. Pat. No. 8,709,424.

[0224] SEQ ID NO:115 is the amino acid sequence of the 61F6 light chain CDR2 from U.S. Pat. No. 8,709,424.

[0225] SEQ ID NO:116 is the amino acid sequence of the 1D8 light chain CDR2 from U.S. Pat. No. 8,709,424.

[0226] SEQ ID NO:117 is the amino acid sequence of the 17F10 light chain CDR2 from U.S. Pat. No. 8,709,424.

[0227] SEQ ID NO:118 is the amino acid sequence of the 35D8 light chain CDR2 from U.S. Pat. No. 8,709,424.

[0228] SEQ ID NO:119 is the amino acid sequence of the 49A1 light chain CDR2 from U.S. Pat. No. 8,709,424.

[0229] SEQ ID NO:120 is the amino acid sequence of the 9E5 light chain CDR2 from U.S. Pat. No. 8,709,424.

[0230] SEQ ID NO:121 is the amino acid sequence of the 31H6 light chain CDR2 from U.S. Pat. No. 8,709,424.

[0231] SEQ ID NO:122 is the amino acid sequence of the 36E5 light chain CDR3 from U.S. Pat. No. 8,709,424.

[0232] SEQ ID NO:123 is the amino acid sequence of the 3D6 light chain CDR3 from U.S. Pat. No. 8,709,424.

[0233] SEQ ID NO:124 is the amino acid sequence of the 61G6 light chain CDR3 from U.S. Pat. No. 8,709,424.

[0234] SEQ ID NO:125 is the amino acid sequence of the 6H6 light chain CDR3 from U.S. Pat. No. 8,709,424.

[0235] SEQ ID NO:126 is the amino acid sequence of the 61F6 light chain CDR3 from U.S. Pat. No. 8,709,424.

[0236] SEQ ID NO:127 is the amino acid sequence of the 1D8 light chain CDR3 from U.S. Pat. No. 8,709,424.

[0237] SEQ ID NO:128 is the amino acid sequence of the 17F10 light chain CDR3 from U.S. Pat. No. 8,709,424.

[0238] SEQ ID NO:129 is the amino acid sequence of the 35D8 light chain CDR3 from U.S. Pat. No. 8,709,424.

[0239] SEQ ID NO:130 is the amino acid sequence of the 49A1 light chain CDR3 from U.S. Pat. No. 8,709,424.

[0240] SEQ ID NO:131 is the amino acid sequence of the 9E5 light chain CDR3 from U.S. Pat. No. 8,709,424.

[0241] SEQ ID NO:132 is the amino acid sequence of the 31H6 light chain CDR3 from U.S. Pat. No. 8,709,424.

[0242] SEQ ID NO:133 is the amino acid sequence of the 2155 variable heavy chain from U.S. Patent Application Publication No. US 2013/0108641 A1.

[0243] SEQ ID NO:134 is the amino acid sequence of the 2155 variable light chain from U.S. Patent Application Publication No. US 2013/0108641 A1.

[0244] SEQ ID NO:135 is the amino acid sequence of the 2155 humanized (HC1) heavy chain from U.S. Patent Application Publication No. US 2013/0108641 A1.

[0245] SEQ ID NO:136 is the amino acid sequence of the 2155 humanized (HC2) heavy chain from U.S. Patent Application Publication No. US 2013/0108641 A1.

[0246] SEQ ID NO:137 is the amino acid sequence of the 2155 humanized (HC3a) heavy chain from U.S. Patent Application Publication No. US 2013/0108641 A1.

[0247] SEQ ID NO:138 is the amino acid sequence of the humanized (HC3b) heavy chain from U.S. Patent Application Publication No. US 2013/0108641 A1.

[0248] SEQ ID NO:139 is the amino acid sequence of the humanized (HC4) heavy chain from U.S. Patent Application Publication No. US 2013/0108641 A1.

[0249] SEQ ID NO:140 is the amino acid sequence of the 2155 humanized (LC1) light chain from U.S. Patent Application Publication No. US 2013/0108641 A1.

[0250] SEQ ID NO:141 is the amino acid sequence of the 2155 humanized (LC2a) light chain from U.S. Patent Application Publication No. US 2013/0108641 A1.

[0251] SEQ ID NO:142 is the amino acid sequence of the 2155 humanized (LC2b) light chain from U.S. Patent Application Publication No. US 2013/0108641 A1.

[0252] SEQ ID NO:143 is the amino acid sequence of the 2155 humanized (LC3) light chain from U.S. Patent Application Publication No. US 2013/0108641 A1.

[0253] SEQ ID NO:144 is the amino acid sequence of the 698 variable heavy chain from U.S. Patent Application Publication No. US 2013/0108641 A1.

[0254] SEQ ID NO:145 is the amino acid sequence of the 698 variable light chain from U.S. Patent Application Publication No. US 2013/0108641 A1.

[0255] SEQ ID NO:146 is the amino acid sequence of the 706 variable heavy chain from U.S. Patent Application Publication No. US 2013/0108641 A1.

[0256] SEQ ID NO:147 is the amino acid sequence of the 706 variable light chain from U.S. Patent Application Publication No. US 2013/0108641 A1.

[0257] SEQ ID NO:148 is the amino acid sequence of the 827 variable heavy chain from U.S. Patent Application Publication No. US 2013/0108641 A1.

[0258] SEQ ID NO:149 is the amino acid sequence of the 827 variable light chain from U.S. Patent Application Publication No. US 2013/0108641 A1.

[0259] SEQ ID NO:150 is the amino acid sequence of the 1718 variable heavy chain from U.S. Patent Application Publication No. US 2013/0108641 A1.

[0260] SEQ ID NO:151 is the amino acid sequence of the 1718 variable light chain from U.S. Patent Application Publication No. US 2013/0108641 A1.

[0261] SEQ ID NO:152 is the amino acid sequence of the 2155 heavy chain CDR3 from U.S. Patent Application Publication No. US 2013/0108641 A1.

[0262] SEQ ID NO:153 is the amino acid sequence of the 2155 heavy chain CDR2 from U.S. Patent Application Publication No. US 2013/0108641 A1.

[0263] SEQ ID NO:154 is the amino acid sequence of the 2155 heavy chain CDR1 from U.S. Patent Application Publication No. US 2013/0108641 A1.

[0264] SEQ ID NO:155 is the amino acid sequence of the 2155 light chain CDR3 from U.S. Patent Application Publication No. US 2013/0108641 A1.

[0265] SEQ ID NO:156 is the amino acid sequence of the 2155 light chain CDR2 from U.S. Patent Application Publication No. US 2013/0108641 A1.

[0266] SEQ ID NO:157 is the amino acid sequence of the 2155 light chain CDR1 from U.S. Patent Application Publication No. US 2013/0108641 A1.

[0267] SEQ ID NO:158 is the amino acid sequence of the 698 and 706 heavy chain CDR3 from U.S. Patent Application Publication No. US 2013/0108641 A1.

[0268] SEQ ID NO:159 is the amino acid sequence of the 698 and 706 heavy chain CDR2 from U.S. Patent Application Publication No. US 2013/0108641 A1.

[0269] SEQ ID NO:160 is the amino acid sequence of the 698 and 706 heavy chain CDR1 from U.S. Patent Application Publication No. US 2013/0108641 A1.

[0270] SEQ ID NO:161 is the amino acid sequence of the 698 light chain CDR3 from U.S. Patent Application Publication No. US 2013/0108641 A1.

[0271] SEQ ID NO:162 is the amino acid sequence of the 698, 706, 827, and 1649 light chain CDR2 from U.S. Patent Application Publication No. US 2013/0108641 A1.

[0272] SEQ ID NO:163 is the amino acid sequence of the 698, 706, 827, and 1649 light chain CDR1 from U.S. Patent Application Publication No. US 2013/0108641 A1.

[0273] SEQ ID NO:164 is the amino acid sequence of the 706, 827, and 1649 light chain CDR3 from U.S. Patent Application Publication No. US 2013/0108641 A1.

[0274] SEQ ID NO:165 is the amino acid sequence of the 827 and 1649 heavy chain CDR3 from U.S. Patent Application Publication No. US 2013/0108641 A1.

[0275] SEQ ID NO:166 is the amino acid sequence of the 827 heavy chain CDR2 from U.S. Patent Application Publication No. US 2013/0108641 A1.

[0276] SEQ ID NO:167 is the amino acid sequence of the 1649 heavy chain CDR2 from U.S. Patent Application Publication No. US 2013/0108641 A1.

[0277] SEQ ID NO:168 is the amino acid sequence of the 1718 heavy chain CDR3 from U.S. Patent Application Publication No. US 2013/0108641 A1.

[0278] SEQ ID NO:169 is the amino acid sequence of the 1718 heavy chain CDR2 from U.S. Patent Application Publication No. US 2013/0108641 A1.

[0279] SEQ ID NO:170 is the amino acid sequence of the 1718 heavy chain CDR1 from U.S. Patent Application Publication No. US 2013/0108641 A1.

[0280] SEQ ID NO:171 is the amino acid sequence of the 1718 light chain CDR3 from U.S. Patent Application Publication No. US 2013/0108641 A1.

[0281] SEQ ID NO:172 is the amino acid sequence of the 1718 light chain CDR2 from U.S. Patent Application Publication No. US 2013/0108641 A1.

[0282] SEQ ID NO:173 is the amino acid sequence of the 1718 light chain CDR1 from U.S. Patent Application Publication No. US 2013/0108641 A1.

[0283] SEQ ID NO:174 is the amino acid sequence of the 827 and 1649 heavy chain CDR1 from U.S. Patent Application Publication No. US 2013/0108641 A1.

[0284] SEQ ID NO:175 is the amino acid sequence of the 1D7 heavy chain from U.S. Patent Application Publication No. US 2015/0064204 A1.

[0285] SEQ ID NO:176 is the amino acid sequence of the 1D7 light chain from U.S. Patent Application Publication No. US 2015/0064204 A1.

[0286] SEQ ID NO:177 is the amino acid sequence of the 1D7 variable heavy chain from U.S. Patent Application Publication No. US 2015/0064204 A1.

[0287] SEQ ID NO:178 is the amino acid sequence of the 1D7 variable light chain from U.S. Patent Application Publication No. US 2015/0064204 A1.

[0288] SEQ ID NO:179 is the amino acid sequence of the 1D7 heavy chain CDR1 from U.S. Patent Application Publication No. US 2015/0064204 A1.

[0289] SEQ ID NO:180 is the amino acid sequence of the 1D7 heavy chain CDR2 from U.S. Patent Application Publication No. US 2015/0064204 A1.

[0290] SEQ ID NO:181 is the amino acid sequence of the 1D7 heavy chain CDR3 from U.S. Patent Application Publication No. US 2015/0064204 A1.

[0291] SEQ ID NO:182 is the amino acid sequence of the 1D7 light chain CDR1 from U.S. Patent Application Publication No. US 2015/0064204 A1.

[0292] SEQ ID NO:183 is the amino acid sequence of the 1D7 light chain CDR2 from U.S. Patent Application Publication No. US 2015/0064204 A1.

[0293] SEQ ID NO:184 is the amino acid sequence of the 1D7 light chain CDR3 from U.S. Patent Application Publication No. US 2015/0064204 A1.

[0294] SEQ ID NO:185 is the amino acid sequence of the 33C9 heavy chain from U.S. Patent Application Publication No. US 2015/0064204 A1.

[0295] SEQ ID NO:186 is the amino acid sequence of the 33C9 light chain from U.S. Patent Application Publication No. US 2015/0064204 A1.

[0296] SEQ ID NO:187 is the amino acid sequence of the 33C9 variable heavy chain from U.S. Patent Application Publication No. US 2015/0064204 A1.

[0297] SEQ ID NO:188 is the amino acid sequence of the 33C9 variable light chain from U.S. Patent Application Publication No. US 2015/0064204 A1.

[0298] SEQ ID NO:189 is the amino acid sequence of the 33C9 heavy chain CDR1 from U.S. Patent Application Publication No. US 2015/0064204 A1.

[0299] SEQ ID NO:190 is the amino acid sequence of the 33C9 heavy chain CDR2 from U.S. Patent Application Publication No. US 2015/0064204 A1.

[0300] SEQ ID NO:191 is the amino acid sequence of the 33C9 heavy chain CDR3 from U.S. Patent Application Publication No. US 2015/0064204 A1.

[0301] SEQ ID NO:192 is the amino acid sequence of the 33C9 light chain CDR1 from U.S. Patent Application Publication No. US 2015/0064204 A1.

[0302] SEQ ID NO:193 is the amino acid sequence of the 33C9 light chain CDR2 from U.S. Patent Application Publication No. US 2015/0064204 A1.

[0303] SEQ ID NO:194 is the amino acid sequence of the 33C9 light chain CDR3 from U.S. Patent Application Publication No. US 2015/0064204 A1.

[0304] SEQ ID NO:195 is the amino acid sequence of the 33F6 heavy chain from U.S. Patent Application Publication No. US 2015/0064204 A1.

[0305] SEQ ID NO:196 is the amino acid sequence of the 33F6 light chain from U.S. Patent Application Publication No. US 2015/0064204 A1.

[0306] SEQ ID NO:197 is the amino acid sequence of the 33F6 variable heavy chain from U.S. Patent Application Publication No. US 2015/0064204 A1.

[0307] SEQ ID NO:198 is the amino acid sequence of the 33F6 variable light chain from U.S. Patent Application Publication No. US 2015/0064204 A1.

[0308] SEQ ID NO:199 is the amino acid sequence of the 33F6 heavy chain CDR1 from U.S. Patent Application Publication No. US 2015/0064204 A1.

[0309] SEQ ID NO:200 is the amino acid sequence of the 33F6 heavy chain CDR2 from U.S. Patent Application Publication No. US 2015/0064204 A1.

[0310] SEQ ID NO:201 is the amino acid sequence of the 33F6 heavy chain CDR3 from U.S. Patent Application Publication No. US 2015/0064204 A1.

[0311] SEQ ID NO:202 is the amino acid sequence of the 33F6 light chain CDR1 from U.S. Patent Application Publication No. US 2015/0064204 A1.

[0312] SEQ ID NO:203 is the amino acid sequence of the 33F6 light chain CDR2 from U.S. Patent Application Publication No. US 2015/0064204 A1.

[0313] SEQ ID NO:204 is the amino acid sequence of the 33F6 light chain CDR3 from U.S. Patent Application Publication No. US 2015/0064204 A1.

[0314] SEQ ID NO:205 is the amino acid sequence of the 34G4 heavy chain from U.S. Patent Application Publication No. US 2015/0064204 A1.

[0315] SEQ ID NO:206 is the amino acid sequence of the 34G4 light chain from U.S. Patent Application Publication No. US 2015/0064204 A1.

[0316] SEQ ID NO:207 is the amino acid sequence of the 34G4 variable heavy chain from U.S. Patent Application Publication No. US 2015/0064204 A1.

[0317] SEQ ID NO:208 is the amino acid sequence of the 34G4 variable light chain from U.S. Patent Application Publication No. US 2015/0064204 A1.

[0318] SEQ ID NO:209 is the amino acid sequence of the 34G4 heavy chain CDR1 from U.S. Patent Application Publication No. US 2015/0064204 A1.

[0319] SEQ ID NO:210 is the amino acid sequence of the 34G4 heavy chain CDR2 from U.S. Patent Application Publication No. US 2015/0064204 A1.

[0320] SEQ ID NO:211 is the amino acid sequence of the 34G4 heavy chain CDR3 from U.S. Patent Application Publication No. US 2015/0064204 A1.

[0321] SEQ ID NO:212 is the amino acid sequence of the 34G4 light chain CDR1 from U.S. Patent Application Publication No. US 2015/0064204 A1.

[0322] SEQ ID NO:213 is the amino acid sequence of the 34G4 light chain CDR2 from U.S. Patent Application Publication No. US 2015/0064204 A1.

[0323] SEQ ID NO:214 is the amino acid sequence of the 34G4 light chain CDR3 from U.S. Patent Application Publication No. US 2015/0064204 A1.

[0324] SEQ ID NO:215 is the amino acid sequence of the 35B10 heavy chain from U.S. Patent Application Publication No. US 2015/0064204 A1.

[0325] SEQ ID NO:216 is the amino acid sequence of the 35B10 light chain from U.S. Patent Application Publication No. US 2015/0064204 A1.

[0326] SEQ ID NO:217 is the amino acid sequence of the 35B10 variable heavy chain from U.S. Patent Application Publication No. US 2015/0064204 A1.

[0327] SEQ ID NO:218 is the amino acid sequence of the 35B10 variable light chain from U.S. Patent Application Publication No. US 2015/0064204 A1.

[0328] SEQ ID NO:219 is the amino acid sequence of the 35B10 heavy chain CDR1 from U.S. Patent Application Publication No. US 2015/0064204 A1.

[0329] SEQ ID NO:220 is the amino acid sequence of the 35B10 heavy chain CDR2 from U.S. Patent Application Publication No. US 2015/0064204 A1.

[0330] SEQ ID NO:221 is the amino acid sequence of the 35B10 heavy chain CDR3 from U.S. Patent Application Publication No. US 2015/0064204 A1.

[0331] SEQ ID NO:222 is the amino acid sequence of the 35B10 light chain CDR1 from U.S. Patent Application Publication No. US 2015/0064204 A1.

[0332] SEQ ID NO:223 is the amino acid sequence of the 35B10 light chain CDR2 from U.S. Patent Application Publication No. US 2015/0064204 A1.

[0333] SEQ ID NO:224 is the amino acid sequence of the 35B10 light chain CDR3 from U.S. Patent Application Publication No. US 2015/0064204 A1.

[0334] SEQ ID NO:225 is the amino acid sequence of the 41E11 heavy chain from U.S. Patent Application Publication No. US 2015/0064204 A1.

[0335] SEQ ID NO:226 is the amino acid sequence of the 41E11 light chain from U.S. Patent Application Publication No. US 2015/0064204 A1.

[0336] SEQ ID NO:227 is the amino acid sequence of the 41E11 variable heavy chain from U.S. Patent Application Publication No. US 2015/0064204 A1.

[0337] SEQ ID NO:228 is the amino acid sequence of the 41E11 variable light chain from U.S. Patent Application Publication No. US 2015/0064204 A1.

[0338] SEQ ID NO:229 is the amino acid sequence of the 41E11 heavy chain CDR1 from U.S. Patent Application Publication No. US 2015/0064204 A1.

[0339] SEQ ID NO:230 is the amino acid sequence of the 41E11 heavy chain CDR2 from U.S. Patent Application Publication No. US 2015/0064204 A1.

[0340] SEQ ID NO:231 is the amino acid sequence of the 41E11 heavy chain CDR3 from U.S. Patent Application Publication No. US 2015/0064204 A1.

[0341] SEQ ID NO:232 is the amino acid sequence of the 41E11 light chain CDR1 from U.S. Patent Application Publication No. US 2015/0064204 A1.

[0342] SEQ ID NO:233 is the amino acid sequence of the 41E11 light chain CDR2 from U.S. Patent Application Publication No. US 2015/0064204 A1.

[0343] SEQ ID NO:234 is the amino acid sequence of the 41E11 light chain CDR3 from U.S. Patent Application Publication No. US 2015/0064204 A1.

[0344] SEQ ID NO:235 is the amino acid sequence of the 41G5 heavy chain from U.S. Patent Application Publication No. US 2015/0064204 A1.

[0345] SEQ ID NO:236 is the amino acid sequence of the 41G5 light chain from U.S. Patent Application Publication No. US 2015/0064204 A1.

[0346] SEQ ID NO:237 is the amino acid sequence of the 41G5 variable heavy chain from U.S. Patent Application Publication No. US 2015/0064204 A1.

[0347] SEQ ID NO:238 is the amino acid sequence of the 41G5 variable light chain from U.S. Patent Application Publication No. US 2015/0064204 A1.

[0348] SEQ ID NO:239 is the amino acid sequence of the 41G5 heavy chain CDR1 from U.S. Patent Application Publication No. US 2015/0064204 A1.

[0349] SEQ ID NO:240 is the amino acid sequence of the 41G5 heavy chain CDR2 from U.S. Patent Application Publication No. US 2015/0064204 A1.

[0350] SEQ ID NO:241 is the amino acid sequence of the 41G5 heavy chain CDR3 from U.S. Patent Application Publication No. US 2015/0064204 A1.

[0351] SEQ ID NO:242 is the amino acid sequence of the 41G5 light chain CDR1 from U.S. Patent Application Publication No. US 2015/0064204 A1.

[0352] SEQ ID NO:243 is the amino acid sequence of the 41G5 light chain CDR2 from U.S. Patent Application Publication No. US 2015/0064204 A1.

[0353] SEQ ID NO:244 is the amino acid sequence of the 41G5 light chain CDR3 from U.S. Patent Application Publication No. US 2015/0064204 A1.

[0354] SEQ ID NO:245 is the amino acid sequence of the 42A11 heavy chain from U.S. Patent Application Publication No. US 2015/0064204 A1.

[0355] SEQ ID NO:246 is the amino acid sequence of the 42A11 light chain from U.S. Patent Application Publication No. US 2015/0064204 A1.

[0356] SEQ ID NO:247 is the amino acid sequence of the 42A11 variable heavy chain from U.S. Patent Application Publication No. US 2015/0064204 A1.

[0357] SEQ ID NO:248 is the amino acid sequence of the 42A11 variable light chain from U.S. Patent Application Publication No. US 2015/0064204 A1.

[0358] SEQ ID NO:249 is the amino acid sequence of the 42A11 heavy chain CDR1 from U.S. Patent Application Publication No. US 2015/0064204 A1.

[0359] SEQ ID NO:250 is the amino acid sequence of the 42A11 heavy chain CDR2 from U.S. Patent Application Publication No. US 2015/0064204 A1.

[0360] SEQ ID NO:251 is the amino acid sequence of the 42A11 heavy chain CDR3 from U.S. Patent Application Publication No. US 2015/0064204 A1.

[0361] SEQ ID NO:252 is the amino acid sequence of the 42A11 light chain CDR1 from U.S. Patent Application Publication No. US 2015/0064204 A1.

[0362] SEQ ID NO:253 is the amino acid sequence of the 42A11 light chain CDR2 from U.S. Patent Application Publication No. US 2015/0064204 A1.

[0363] SEQ ID NO:254 is the amino acid sequence of the 42A11 light chain CDR3 from U.S. Patent Application Publication No. US 2015/0064204 A1.

[0364] SEQ ID NO:255 is the amino acid sequence of the 44C1 heavy chain from U.S. Patent Application Publication No. US 2015/0064204 A1.

[0365] SEQ ID NO:256 is the amino acid sequence of the 44C1 light chain from U.S. Patent Application Publication No. US 2015/0064204 A1.

[0366] SEQ ID NO:257 is the amino acid sequence of the 44C1 variable heavy chain from U.S. Patent Application Publication No. US 2015/0064204 A1.

[0367] SEQ ID NO:258 is the amino acid sequence of the 44C1 variable light chain from U.S. Patent Application Publication No. US 2015/0064204 A1.

[0368] SEQ ID NO:259 is the amino acid sequence of the 44C1 heavy chain CDR1 from U.S. Patent Application Publication No. US 2015/0064204 A1.

[0369] SEQ ID NO:260 is the amino acid sequence of the 44C1 heavy chain CDR2 from U.S. Patent Application Publication No. US 2015/0064204 A1.

[0370] SEQ ID NO:261 is the amino acid sequence of the 44C1 heavy chain CDR3 from U.S. Patent Application Publication No. US 2015/0064204 A1.

[0371] SEQ ID NO:262 is the amino acid sequence of the 44C1 light chain CDR1 from U.S. Patent Application Publication No. US 2015/0064204 A1.

[0372] SEQ ID NO:263 is the amino acid sequence of the 44C1 light chain CDR2 from U.S. Patent Application Publication No. US 2015/0064204 A1.

[0373] SEQ ID NO:264 is the amino acid sequence of the 44C1 light chain CDR3 from U.S. Patent Application Publication No. US 2015/0064204 A1.

[0374] SEQ ID NO:265 is the amino acid sequence of the 45A8 heavy chain from U.S. Patent Application Publication No. US 2015/0064204 A1.

[0375] SEQ ID NO:266 is the amino acid sequence of the 45A8 light chain from U.S. Patent Application Publication No. US 2015/0064204 A1.

[0376] SEQ ID NO:267 is the amino acid sequence of the 45A8 variable heavy chain from U.S. Patent Application Publication No. US 2015/0064204 A1.

[0377] SEQ ID NO:268 is the amino acid sequence of the 45A8 variable light chain from U.S. Patent Application Publication No. US 2015/0064204 A1.

[0378] SEQ ID NO:269 is the amino acid sequence of the 45A8 heavy chain CDR1 from U.S. Patent Application Publication No. US 2015/0064204 A1.

[0379] SEQ ID NO:270 is the amino acid sequence of the 45A8 heavy chain CDR2 from U.S. Patent Application Publication No. US 2015/0064204 A1.

[0380] SEQ ID NO:271 is the amino acid sequence of the 45A8 heavy chain CDR3 from U.S. Patent Application Publication No. US 2015/0064204 A1.

[0381] SEQ ID NO:272 is the amino acid sequence of the 45A8 light chain CDR1 from U.S. Patent Application Publication No. US 2015/0064204 A1.

[0382] SEQ ID NO:273 is the amino acid sequence of the 45A8 light chain CDR2 from U.S. Patent Application Publication No. US 2015/0064204 A1.

[0383] SEQ ID NO:274 is the amino acid sequence of the 45A8 light chain CDR3 from U.S. Patent Application Publication No. US 2015/0064204 A1.

[0384] SEQ ID NO:275 is the amino acid sequence of the 46E11 heavy chain from U.S. Patent Application Publication No. US 2015/0064204 A1.

[0385] SEQ ID NO:276 is the amino acid sequence of the 46E11 light chain from U.S. Patent Application Publication No. US 2015/0064204 A1.

[0386] SEQ ID NO:277 is the amino acid sequence of the 46E11 variable heavy chain from U.S. Patent Application Publication No. US 2015/0064204 A1.

[0387] SEQ ID NO:278 is the amino acid sequence of the 46E11 variable light chain from U.S. Patent Application Publication No. US 2015/0064204 A1.

[0388] SEQ ID NO:279 is the amino acid sequence of the 46E11 heavy chain CDR1 from U.S. Patent Application Publication No. US 2015/0064204 A1.

[0389] SEQ ID NO:280 is the amino acid sequence of the 46E11 heavy chain CDR2 from U.S. Patent Application Publication No. US 2015/0064204 A1.

[0390] SEQ ID NO:281 is the amino acid sequence of the 46E11 heavy chain CDR3 from U.S. Patent Application Publication No. US 2015/0064204 A1.

[0391] SEQ ID NO:282 is the amino acid sequence of the 46E11 light chain CDR1 from U.S. Patent Application Publication No. US 2015/0064204 A1.

[0392] SEQ ID NO:283 is the amino acid sequence of the 46E11 light chain CDR2 from U.S. Patent Application Publication No. US 2015/0064204 A1.

[0393] SEQ ID NO:284 is the amino acid sequence of the 46E11 light chain CDR3 from U.S. Patent Application Publication No. US 2015/0064204 A1.

[0394] SEQ ID NO:285 is the amino acid sequence of the 48H12 heavy chain from U.S. Patent Application Publication No. US 2015/0064204 A1.

[0395] SEQ ID NO:286 is the amino acid sequence of the 48H12 light chain from U.S. Patent Application Publication No. US 2015/0064204 A1.

[0396] SEQ ID NO:287 is the amino acid sequence of the 48H12 variable heavy chain from U.S. Patent Application Publication No. US 2015/0064204 A1.

[0397] SEQ ID NO:288 is the amino acid sequence of the 48H12 variable light chain from U.S. Patent Application Publication No. US 2015/0064204 A1.

[0398] SEQ ID NO:289 is the amino acid sequence of the 48H12 heavy chain CDR1 from U.S. Patent Application Publication No. US 2015/0064204 A1.

[0399] SEQ ID NO:290 is the amino acid sequence of the 48H12 heavy chain CDR2 from U.S. Patent Application Publication No. US 2015/0064204 A1.

[0400] SEQ ID NO:291 is the amino acid sequence of the 48H12 heavy chain CDR3 from U.S. Patent Application Publication No. US 2015/0064204 A1.

[0401] SEQ ID NO:292 is the amino acid sequence of the 48H12 light chain CDR1 from U.S. Patent Application Publication No. US 2015/0064204 A1.

[0402] SEQ ID NO:293 is the amino acid sequence of the 48H12 light chain CDR2 from U.S. Patent Application Publication No. US 2015/0064204 A1.

[0403] SEQ ID NO:294 is the amino acid sequence of the 48H12 light chain CDR3 from U.S. Patent Application Publication No. US 2015/0064204 A1.

[0404] SEQ ID NO:295 is the amino acid sequence of the 48H7 heavy chain from U.S. Patent Application Publication No. US 2015/0064204 A1.

[0405] SEQ ID NO:296 is the amino acid sequence of the 48H7 light chain from U.S. Patent Application Publication No. US 2015/0064204 A1.

[0406] SEQ ID NO:297 is the amino acid sequence of the 48H7 variable heavy chain from U.S. Patent Application Publication No. US 2015/0064204 A1.

[0407] SEQ ID NO:298 is the amino acid sequence of the 48H7 variable light chain from U.S. Patent Application Publication No. US 2015/0064204 A1.

[0408] SEQ ID NO:299 is the amino acid sequence of the 48H7 heavy chain CDR1 from U.S. Patent Application Publication No. US 2015/0064204 A1.

[0409] SEQ ID NO:300 is the amino acid sequence of the 48H7 heavy chain CDR2 from U.S. Patent Application Publication No. US 2015/0064204 A1.

[0410] SEQ ID NO:301 is the amino acid sequence of the 48H7 heavy chain CDR3 from U.S. Patent Application Publication No. US 2015/0064204 A1.

[0411] SEQ ID NO:302 is the amino acid sequence of the 48H7 light chain CDR1 from U.S. Patent Application Publication No. US 2015/0064204 A1.

[0412] SEQ ID NO:303 is the amino acid sequence of the 48H7 light chain CDR2 from U.S. Patent Application Publication No. US 2015/0064204 A1.

[0413] SEQ ID NO:304 is the amino acid sequence of the 48H7 light chain CDR3 from U.S. Patent Application Publication No. US 2015/0064204 A1.

[0414] SEQ ID NO:305 is the amino acid sequence of the 49D9 heavy chain from U.S. Patent Application Publication No. US 2015/0064204 A1.

[0415] SEQ ID NO:306 is the amino acid sequence of the 49D9 light chain from U.S. Patent Application Publication No. US 2015/0064204 A1.

[0416] SEQ ID NO:307 is the amino acid sequence of the 49D9 variable heavy chain from U.S. Patent Application Publication No. US 2015/0064204 A1.

[0417] SEQ ID NO:308 is the amino acid sequence of the 49D9 variable light chain from U.S. Patent Application Publication No. US 2015/0064204 A1.

[0418] SEQ ID NO:309 is the amino acid sequence of the 49D9 heavy chain CDR1 from U.S. Patent Application Publication No. US 2015/0064204 A1.

[0419] SEQ ID NO:310 is the amino acid sequence of the 49D9 heavy chain CDR2 from U.S. Patent Application Publication No. US 2015/0064204 A1.

[0420] SEQ ID NO:311 is the amino acid sequence of the 49D9 heavy chain CDR3 from U.S. Patent Application Publication No. US 2015/0064204 A1.

[0421] SEQ ID NO:312 is the amino acid sequence of the 49D9 light chain CDR1 from U.S. Patent Application Publication No. US 2015/0064204 A1.

[0422] SEQ ID NO:313 is the amino acid sequence of the 49D9 light chain CDR2 from U.S. Patent Application Publication No. US 2015/0064204 A1.

[0423] SEQ ID NO:314 is the amino acid sequence of the 49D9 light chain CDR3 from U.S. Patent Application Publication No. US 2015/0064204 A1.

[0424] SEQ ID NO:315 is the amino acid sequence of the 49E2 heavy chain from U.S. Patent Application Publication No. US 2015/0064204 A1.

[0425] SEQ ID NO:316 is the amino acid sequence of the 49E2 light chain from U.S. Patent Application Publication No. US 2015/0064204 A1.

[0426] SEQ ID NO:317 is the amino acid sequence of the 49E2 variable heavy chain from U.S. Patent Application Publication No. US 2015/0064204 A1.

[0427] SEQ ID NO:318 is the amino acid sequence of the 49E2 variable light chain from U.S. Patent Application Publication No. US 2015/0064204 A1.

[0428] SEQ ID NO:319 is the amino acid sequence of the 49E2 heavy chain CDR1 from U.S. Patent Application Publication No. US 2015/0064204 A1.

[0429] SEQ ID NO:320 is the amino acid sequence of the 49E2 heavy chain CDR2 from U.S. Patent Application Publication No. US 2015/0064204 A1.

[0430] SEQ ID NO:321 is the amino acid sequence of the 49E2 heavy chain CDR3 from U.S. Patent Application Publication No. US 2015/0064204 A1.

[0431] SEQ ID NO:322 is the amino acid sequence of the 49E2 light chain CDR1 from U.S. Patent Application Publication No. US 2015/0064204 A1.

[0432] SEQ ID NO:323 is the amino acid sequence of the 49E2 light chain CDR2 from U.S. Patent Application Publication No. US 2015/0064204 A1.

[0433] SEQ ID NO:324 is the amino acid sequence of the 49E2 light chain CDR3 from U.S. Patent Application Publication No. US 2015/0064204 A1.

[0434] SEQ ID NO:325 is the amino acid sequence of the 48A9 heavy chain from U.S. Patent Application Publication No. US 2015/0064204 A1.

[0435] SEQ ID NO:326 is the amino acid sequence of the 48A9 light chain from U.S. Patent Application Publication No. US 2015/0064204 A1.

[0436] SEQ ID NO:327 is the amino acid sequence of the 48A9 variable heavy chain from U.S. Patent Application Publication No. US 2015/0064204 A1.

[0437] SEQ ID NO:328 is the amino acid sequence of the 48A9 variable light chain from U.S. Patent Application Publication No. US 2015/0064204 A1.

[0438] SEQ ID NO:329 is the amino acid sequence of the 48A9 heavy chain CDR1 from U.S. Patent Application Publication No. US 2015/0064204 A1.

[0439] SEQ ID NO:330 is the amino acid sequence of the 48A9 heavy chain CDR2 from U.S. Patent Application Publication No. US 2015/0064204 A1.

[0440] SEQ ID NO:331 is the amino acid sequence of the 48A9 heavy chain CDR3 from U.S. Patent Application Publication No. US 2015/0064204 A1.

[0441] SEQ ID NO:332 is the amino acid sequence of the 48A9 light chain CDR1 from U.S. Patent Application Publication No. US 2015/0064204 A1.

[0442] SEQ ID NO:333 is the amino acid sequence of the 48A9 light chain CDR2 from U.S. Patent Application Publication No. US 2015/0064204 A1.

[0443] SEQ ID NO:334 is the amino acid sequence of the 48A9 light chain CDR3 from U.S. Patent Application Publication No. US 2015/0064204 A1.

[0444] SEQ ID NO:335 is the amino acid sequence of the 5H7 heavy chain from U.S. Patent Application Publication No. US 2015/0064204 A1.

[0445] SEQ ID NO:336 is the amino acid sequence of the 5H7 light chain from U.S. Patent Application Publication No. US 2015/0064204 A1.

[0446] SEQ ID NO:337 is the amino acid sequence of the 5H7 variable heavy chain from U.S. Patent Application Publication No. US 2015/0064204 A1.

[0447] SEQ ID NO:338 is the amino acid sequence of the 5H7 variable light chain from U.S. Patent Application Publication No. US 2015/0064204 A1.

[0448] SEQ ID NO:339 is the amino acid sequence of the 5H7 heavy chain CDR1 from U.S. Patent Application Publication No. US 2015/0064204 A1.

[0449] SEQ ID NO:340 is the amino acid sequence of the 5H7 heavy chain CDR2 from U.S. Patent Application Publication No. US 2015/0064204 A1.

[0450] SEQ ID NO:341 is the amino acid sequence of the 5H7 heavy chain CDR3 from U.S. Patent Application Publication No. US 2015/0064204 A1.

[0451] SEQ ID NO:342 is the amino acid sequence of the 5H7 light chain CDR1 from U.S. Patent Application Publication No. US 2015/0064204 A1.

[0452] SEQ ID NO:343 is the amino acid sequence of the 5H7 light chain CDR2 from U.S. Patent Application Publication No. US 2015/0064204 A1.

[0453] SEQ ID NO:344 is the amino acid sequence of the 5H7 light chain CDR3 from U.S. Patent Application Publication No. US 2015/0064204 A1.

[0454] SEQ ID NO:345 is the amino acid sequence of the 7A10 heavy chain from U.S. Patent Application Publication No. US 2015/0064204 A1.

[0455] SEQ ID NO:346 is the amino acid sequence of the 7A10 light chain from U.S. Patent Application Publication No. US 2015/0064204 A1.

[0456] SEQ ID NO:347 is the amino acid sequence of the 7A10 variable heavy chain from U.S. Patent Application Publication No. US 2015/0064204 A1.

[0457] SEQ ID NO:348 is the amino acid sequence of the 7A10 variable light chain from U.S. Patent Application Publication No. US 2015/0064204 A1.

[0458] SEQ ID NO:349 is the amino acid sequence of the 7A10 heavy chain CDR1 from U.S. Patent Application Publication No. US 2015/0064204 A1.

[0459] SEQ ID NO:350 is the amino acid sequence of the 7A10 heavy chain CDR2 from U.S. Patent Application Publication No. US 2015/0064204 A1.

[0460] SEQ ID NO:351 is the amino acid sequence of the 7A10 heavy chain CDR3 from U.S. Patent Application Publication No. US 2015/0064204 A1.

[0461] SEQ ID NO:352 is the amino acid sequence of the 7A10 light chain CDR1 from U.S. Patent Application Publication No. US 2015/0064204 A1.

[0462] SEQ ID NO:353 is the amino acid sequence of the 7A10 light chain CDR2 from U.S. Patent Application Publication No. US 2015/0064204 A1.

[0463] SEQ ID NO:354 is the amino acid sequence of the 7A10 light chain CDR3 from U.S. Patent Application Publication No. US 2015/0064204 A1.

[0464] SEQ ID NO:355 is the amino acid sequence of the 9H6 heavy chain from U.S. Patent Application Publication No. US 2015/0064204 A1.

[0465] SEQ ID NO:356 is the amino acid sequence of the 9H6 light chain from U.S. Patent Application Publication No. US 2015/0064204 A1.

[0466] SEQ ID NO:357 is the amino acid sequence of the 9H6 variable heavy chain from U.S. Patent Application Publication No. US 2015/0064204 A1.

[0467] SEQ ID NO:358 is the amino acid sequence of the 9H6 variable light chain from U.S. Patent Application Publication No. US 2015/0064204 A1.

[0468] SEQ ID NO:359 is the amino acid sequence of the 9H6 heavy chain CDR1 from U.S. Patent Application Publication No. US 2015/0064204 A1.

[0469] SEQ ID NO:360 is the amino acid sequence of the 9H6 heavy chain CDR2 from U.S. Patent Application Publication No. US 2015/0064204 A1.

[0470] SEQ ID NO:361 is the amino acid sequence of the 9H6 heavy chain CDR3 from U.S. Patent Application Publication No. US 2015/0064204 A1.

[0471] SEQ ID NO:362 is the amino acid sequence of the 9H6 light chain CDR1 from U.S. Patent Application Publication No. US 2015/0064204 A1.

[0472] SEQ ID NO:363 is the amino acid sequence of the 9H6 light chain CDR2 from U.S. Patent Application Publication No. US 2015/0064204 A1.

[0473] SEQ ID NO:364 is the amino acid sequence of the 9H6 light chain CDR3 from U.S. Patent Application Publication No. US 2015/0064204 A1.

[0474] SEQ ID NO:365 is the heavy chain amino acid sequence of the anti-CD20 monoclonal antibody rituximab.

[0475] SEQ ID NO:366 is the light chain amino acid sequence of the anti-CD20 monoclonal antibody rituximab.

[0476] SEQ ID NO:367 is the heavy chain amino acid sequence of the anti-CD20 monoclonal antibody obinutuzumab.

[0477] SEQ ID NO:368 is the light chain amino acid sequence of the anti-CD20 monoclonal antibody obinutuzumab.

[0478] SEQ ID NO:369 is the variable heavy chain amino acid sequence of the anti-CD20 monoclonal antibody ofatumumab.

[0479] SEQ ID NO:370 is the variable light chain amino acid sequence of the anti-CD20 monoclonal antibody ofatumumab.

[0480] SEQ ID NO:371 is the Fab fragment heavy chain amino acid sequence of the anti-CD20 monoclonal antibody ofatumumab.

[0481] SEQ ID NO:372 is the Fab fragment light chain amino acid sequence of the anti-CD20 monoclonal antibody ofatumumab.

[0482] SEQ ID NO:373 is the heavy chain amino acid sequence of the anti-CD20 monoclonal antibody veltuzumab.

[0483] SEQ ID NO:374 is the light chain amino acid sequence of the anti-CD20 monoclonal antibody veltuzumab.

[0484] SEQ ID NO:375 is the heavy chain amino acid sequence of the anti-CD20 monoclonal antibody tositumomab.

[0485] SEQ ID NO:376 is the light chain amino acid sequence of the anti-CD20 monoclonal antibody tositumomab.

[0486] SEQ ID NO:377 is the heavy chain amino acid sequence of the anti-CD20 monoclonal antibody ibritumomab.

[0487] SEQ ID NO:378 is the light chain amino acid sequence of the anti-CD20 monoclonal antibody ibritumomab.

[0488] SEQ ID NO:379 is the heavy chain amino acid sequence of the PD-1 inhibitor nivolumab.

[0489] SEQ ID NO:380 is the light chain amino acid sequence of the PD-1 inhibitor nivolumab.

[0490] SEQ ID NO:381 is the heavy chain variable region (V_{H}) amino acid sequence of the PD-1 inhibitor nivolumab.

[0491] SEQ ID NO:382 is the light chain variable region (V_{L}) amino acid sequence of the PD-1 inhibitor nivolumab.

[0492] SEQ ID NO:383 is the heavy chain CDR1 amino acid sequence of the PD-1 inhibitor nivolumab.

[0493] SEQ ID NO:384 is the heavy chain CDR2 amino acid sequence of the PD-1 inhibitor nivolumab.

[0494] SEQ ID NO:385 is the heavy chain CDR3 amino acid sequence of the PD-1 inhibitor nivolumab.

[0495] SEQ ID NO:386 is the light chain CDR1 amino acid sequence of the PD-1 inhibitor nivolumab.

[0496] SEQ ID NO:387 is the light chain CDR2 amino acid sequence of the PD-1 inhibitor nivolumab.

[0497] SEQ ID NO:388 is the light chain CDR3 amino acid sequence of the PD-1 inhibitor nivolumab.

[0498] SEQ ID NO:389 is the heavy chain amino acid sequence of the PD-1 inhibitor pembrolizumab.

[0499] SEQ ID NO:390 is the light chain amino acid sequence of the PD-1 inhibitor pembrolizumab.

[0500] SEQ ID NO:391 is the heavy chain variable region (V_{H}) amino acid sequence of the PD-1 inhibitor pembrolizumab.

[0501] SEQ ID NO:392 is the light chain variable region (V_{L}) amino acid sequence of the PD-1 inhibitor pembrolizumab.

[0502] SEQ ID NO:393 is the heavy chain CDR1 amino acid sequence of the PD-1 inhibitor pembrolizumab.

[0503] SEQ ID NO:394 is the heavy chain CDR2 amino acid sequence of the PD-1 inhibitor pembrolizumab.

[0504] SEQ ID NO:395 is the heavy chain CDR3 amino acid sequence of the PD-1 inhibitor pembrolizumab.

[0505] SEQ ID NO:396 is the light chain CDR1 amino acid sequence of the PD-1 inhibitor pembrolizumab.

[0506] SEQ ID NO:397 is the light chain CDR2 amino acid sequence of the PD-1 inhibitor pembrolizumab.

[0507] SEQ ID NO:398 is the light chain CDR3 amino acid sequence of the PD-1 inhibitor pembrolizumab.

[0508] SEQ ID NO:399 is the heavy chain amino acid sequence of the PD-1 inhibitor pidilizumab.

[0509] SEQ ID NO:400 is the light chain amino acid sequence of the PD-1 inhibitor pidilizumab.

[0510] SEQ ID NO:401 is the heavy chain variable region (V_{H}) amino acid sequence of the PD-1 inhibitor pidilizumab.

[0511] SEQ ID NO:402 is the light chain variable region (V_{L}) amino acid sequence of the PD-1 inhibitor pidilizumab.

[0512] SEQ ID NO:403 is the heavy chain amino acid sequence of the PD-L1 inhibitor durvalumab.

[0513] SEQ ID NO:404 is the light chain amino acid sequence of the PD-L1 inhibitor durvalumab.

[0514] SEQ ID NO:405 is the heavy chain variable region (V_{H}) amino acid sequence of the PD-L1 inhibitor durvalumab.

[0515] SEQ ID NO:406 is the light chain variable region (V_{L}) amino acid sequence of the PD-L1 inhibitor durvalumab.

[0516] SEQ ID NO:407 is the heavy chain CDR1 amino acid sequence of the PD-L1 inhibitor durvalumab.

[0517] SEQ ID NO:408 is the heavy chain CDR2 amino acid sequence of the PD-L1 inhibitor durvalumab.

[0518] SEQ ID NO:409 is the heavy chain CDR3 amino acid sequence of the PD-L1 inhibitor durvalumab.

[0519] SEQ ID NO:410 is the light chain CDR1 amino acid sequence of the PD-L1 inhibitor durvalumab.

[0520] SEQ ID NO:411 is the light chain CDR2 amino acid sequence of the PD-L1 inhibitor durvalumab.

[0521] SEQ ID NO:412 is the light chain CDR3 amino acid sequence of the PD-L1 inhibitor durvalumab.

[0522] SEQ ID NO:413 is the heavy chain amino acid sequence of the PD-L1 inhibitor atezolizumab.

[0523] SEQ ID NO:414 is the light chain amino acid sequence of the PD-L1 inhibitor atezolizumab.

[0524] SEQ ID NO:415 is the heavy chain variable region (V_{H}) amino acid sequence of the PD-L1 inhibitor atezolizumab.

[0525] SEQ ID NO:416 is the light chain variable region (V_{L}) amino acid sequence of the PD-L1 inhibitor atezolizumab.

[0526] SEQ ID NO:417 is the heavy chain CDR1 amino acid sequence of the PD-L1 inhibitor atezolizumab.

[0527] SEQ ID NO:418 is the heavy chain CDR2 amino acid sequence of the PD-L1 inhibitor atezolizumab.

[0528] SEQ ID NO:419 is the heavy chain CDR3 amino acid sequence of the PD-L1 inhibitor atezolizumab.

[0529] SEQ ID NO:420 is the light chain CDR1 amino acid sequence of the PD-L1 inhibitor atezolizumab.

[0530] SEQ ID NO:421 is the light chain CDR2 amino acid sequence of the PD-L1 inhibitor atezolizumab.

[0531] SEQ ID NO:422 is the light chain CDR3 amino acid sequence of the PD-L1 inhibitor atezolizumab.

[0532] SEQ ID NO:423 is the heavy chain amino acid sequence of the PD-L1 inhibitor avelumab.

[0533] SEQ ID NO:424 is the light chain amino acid sequence of the PD-L1 inhibitor avelumab.

[0534] SEQ ID NO:425 is the heavy chain variable region (V_{H}) amino acid sequence of the PD-L1 inhibitor avelumab.

[0535] SEQ ID NO:426 is the heavy chain variable region (V_{H}) amino acid sequence of the PD-L1 inhibitor avelumab.

[0536] SEQ ID NO:427 is the heavy chain CDR1 amino acid sequence of the PD-L1 inhibitor avelumab.

[0537] SEQ ID NO:428 is the heavy chain CDR2 amino acid sequence of the PD-L1 inhibitor avelumab.

[0538] SEQ ID NO:429 is the heavy chain CDR3 amino acid sequence of the PD-L1 inhibitor avelumab.

[0539] SEQ ID NO:430 is the light chain CDR1 amino acid sequence of the PD-L1 inhibitor avelumab.

[0540] SEQ ID NO:431 is the light chain CDR2 amino acid sequence of the PD-L1 inhibitor avelumab.

[0541] SEQ ID NO:432 is the light chain CDR3 amino acid sequence of the PD-L1 inhibitor avelumab.

[0542] SEQ ID NO:433 is the amino acid sequence of human 4-1BB.

[0543] SEQ ID NO:434 is the amino acid sequence of murine 4-1BB.

[0544] SEQ ID NO:435 is the heavy chain for the 4-1BB monoclonal antibody PF-05082566.

[0545] SEQ ID NO:436 is the light chain for the 4-1BB monoclonal antibody PF-05082566.

[0546] SEQ ID NO:437 is the heavy chain variable region for the monoclonal antibody 4-1BB (PF-05082566).

[0547] SEQ ID NO:438 is the light chain variable region for the 4-1BB monoclonal antibody PF-05082566.

[0548] SEQ ID NO:439 is the heavy chain CDR1 for the 4-1BB monoclonal antibody PF-05082566.

[0549] SEQ ID NO:440 is the heavy chain CDR2 for the 4-1BB monoclonal antibody PF-05082566.

[0550] SEQ ID NO:441 is the heavy chain CDR3 for the 4-1BB monoclonal antibody PF-05082566.

[0551] SEQ ID NO:442 is the light chain CDR1 for the 4-1BB monoclonal antibody PF-05082566.

[0552] SEQ ID NO:443 is the light chain CDR2 for the 4-1BB monoclonal antibody PF-05082566.

[0553] SEQ ID NO:444 is the light chain CDR3 for the 4-1BB monoclonal antibody PF-05082566.

[0554] SEQ ID NO:445 is the heavy chain for monoclonal antibody 20H4.9.h4a (urelumab).

[0555] SEQ ID NO:446 is the light chain for monoclonal antibody 20H4.9.LC (urelumab).

[0556] SEQ ID NO:447 is the heavy chain for monoclonal antibody 20H4.9.h4a (urelumab) (corresponding to residues 20-467 of SEQ ID NO:445).

[0557] SEQ ID NO:448 is the light chain for monoclonal antibody 20H4.9.LC (urelumab) (corresponding to residues 21-236 of SEQ ID NO:446).

[0558] SEQ ID NO:449 is the heavy chain variable region for the monoclonal antibody 20H4.9.h4a (urelumab).

[0559] SEQ ID NO:450 is the light chain variable region for the monoclonal antibody 20H4.9.LC (urelumab).

[0560] SEQ ID NO:451 is the heavy chain CDR1 for monoclonal antibody 20H4.9.h4a (urelumab).

[0561] SEQ ID NO:452 is the heavy chain CDR2 for monoclonal antibody 20H4.9.h4a (urelumab).

[0562] SEQ ID NO:453 is the heavy chain CDR3 for monoclonal antibody 20H4.9.h4a (urelumab).

[0563] SEQ ID NO:454 is the light chain CDR1 for monoclonal antibody 20H4.9.LC (urelumab).

[0564] SEQ ID NO:455 is the light chain CDR2 for monoclonal antibody 20H4.9.LC (urelumab).

[0565] SEQ ID NO:456 is the light chain CDR3 for monoclonal antibody 20H4.9.LC (urelumab).

[0566] SEQ ID NO:457 is the heavy chain 20H4.9-IgG1 amino acid sequence.

[0567] SEQ ID NO:458 is the heavy chain for monoclonal antibody H39E3-2.h4a.

[0568] SEQ ID NO:459 is the light chain for monoclonal antibody H39E3.L1.

[0569] SEQ ID NO:460 is the heavy chain CDR1 for monoclonal antibody H39E3-2.h4a.

[0570] SEQ ID NO:461 is the heavy chain CDR2 for monoclonal antibody H39E3-2.h4a.

[0571] SEQ ID NO:462 is the heavy chain CDR3 for monoclonal antibody H39E3-2.h4a.

[0572] SEQ ID NO:463 is the light chain CDR1 for monoclonal antibody H39E3.L1.

[0573] SEQ ID NO:464 is the light chain CDR2 for monoclonal antibody H39E3.L1.

[0574] SEQ ID NO:465 is the light chain CDR3 for monoclonal antibody H39E3.L1.

[0575] SEQ ID NO:466 is version 1 of the light chain variable region for monoclonal antibody 4B4-1-1.

[0576] SEQ ID NO:467 is version 2 of the light chain varibale region for monoclonal antibody 4B4-1-1.

[0577] SEQ ID NO:468 is version 1 of the heavy chain variable region for monoclonal antibody 4B4-1-1.

[0578] SEQ ID NO:469 is version 2 of the heavy chain variable region for monoclonal antibody 4B4-1-1.

[0579] SEQ ID NO:470 is the light chain CDR1 for monoclonal antibody 4B4-1-1.

[0580] SEQ ID NO:471 is the light chain CDR2 for monoclonal antibody 4B4-1-1.

[0581] SEQ ID NO:472 is the light chain CDR3 for monoclonal antibody 4B4-1-1.

[0582] SEQ ID NO:473 is version 1 of the heavy chain CDR1 for monoclonal antibody 4B4-1-1.

[0583] SEQ ID NO:474 is version 2 of the heavy chain CDR1 for monoclonal antibody 4B4-1-1.

[0584] SEQ ID NO:475 is version 1 of the heavy chain CDR2 for monoclonal antibody 4B4-1-1.

[0585] SEQ ID NO:476 is version 2 of the heavy chain CDR2 for monoclonal antibody 4B4-1-1

[0586] SEQ ID NO:477 is the heavy chain CDR3 for monoclonal antibody 4B4-1-1.

[0587] SEQ ID NO:478 is the amino acid sequence of human OX40.

[0588] SEQ ID NO:479 is the amino acid sequence of murine OX40.

[0589] SEQ ID NO:480 is the amino acid sequence of the CDR3 region of scFv SC02008.

[0590] SEQ ID NO:481 is the amino acid sequence of the CDR3 region of scFv SC02009.

[0591] SEQ ID NO:482 is the amino acid sequence of the CDR3 region of scFv SC02010.

[0592] SEQ ID NO:483 is the amino acid sequence of the CDR3 region of scFv SC02011.

[0593] SEQ ID NO:484 is the amino acid sequence of the CDR3 region of scFv SC02012.

[0594] SEQ ID NO:485 is the amino acid sequence of the CDR3 region of scFv SC02021.

[0595] SEQ ID NO:486 is the amino acid sequence of the CDR3 region of scFv SC02022.

[0596] SEQ ID NO:487 is the amino acid sequence of the CDR3 region of scFv SC02023.

[0597] SEQ ID NO:488 is the sequence of the heavy chain of 008.

[0598] SEQ ID NO:489 is the sequence of the heavy chain of 011.

[0599] SEQ ID NO:490 is the sequence of the heavy chain of 021.

[0600] SEQ ID NO:491 is the sequence of the heavy chain of 023.

[0601] SEQ ID NO:492 is the sequence of the light chain of 008.

[0602] SEQ ID NO:493 is the sequence of the light chain of 011.

[0603] SEQ ID NO:494 is the sequence of the light chain of 021.

[0604] SEQ ID NO:495 is the sequence of the light chain of 023.

[0605] SEQ ID NO:496 is the sequence of the heavy chain CDR1 of human antibody 11D4.

[0606] SEQ ID NO:497 is the sequence of the heavy chain CDR2 of human antibody 11D4.

[0607] SEQ ID NO:498 is the sequence of the heavy chain CDR3 of human antibody 11D4.

[0608] SEQ ID NO:499 is the sequence of the light chain CDR1 of human antibody 11D4.

[0609] SEQ ID NO:500 is the sequence of the light chain CDR2 of human antibody 11D4.

[0610] SEQ ID NO:501 is the sequence of the light chain CDR3 of human antibody 11D4.

[0611] SEQ ID NO:502 is the sequence of the variable region of heavy chain of human antibody 11D4.

[0612] SEQ ID NO:503 is the sequence of the variable region of light chain of human antibody 11D4.

[0613] SEQ ID NO:504 is the sequence of the heavy chain of human antibody 11D4.

[0614] SEQ ID NO:505 is the sequence of the light chain of human antibody 11D4.

[0615] SEQ ID NO:506 is the sequence of the heavy chain CDR1 of human antibody 18D8.

[0616] SEQ ID NO:507 is the sequence of the heavy chain CDR2 of human antibody 18D8.

[0617] SEQ ID NO:508 is the sequence of the heavy chain CDR3 of human antibody 18D8.

[0618] SEQ ID NO:509 is the sequence of the light chain CDR1 of human antibody 18D8.

[0619] SEQ ID NO:510 is the sequence of the light chain CDR2 of human antibody 18D8.

[0620] SEQ ID NO:511 is the sequence of the light chain CDR3 of human antibody 18D8.

[0621] SEQ ID NO:512 is the sequence of the variable region of heavy chain of human antibody 18D8.

[0622] SEQ ID NO:513 is the sequence of the variable region of light chain of human antibody 18D8.

[0623] SEQ ID NO:514 is the sequence of the heavy chain of human antibody 18D8.

[0624] SEQ ID NO:515 is the sequence of the light chain of human antibody 18D8.

[0625] SEQ ID NO:516 is the sequence of the heavy chain CDR1 of a humanized antibody.

[0626] SEQ ID NO:517 is the sequence of the heavy chain CDR2 of a humanized antibody.

[0627] SEQ ID NO:518 is the sequence of the heavy chain CDR3 of a humanized antibody.

[0628] SEQ ID NO:519 is the sequence of the heavy chain variable region of a humanized antibody.

[0629] SEQ ID NO:520 is the sequence of the heavy chain variable region of a humanized antibody.

[0630] SEQ ID NO:521 is the sequence of the light chain CDR1 of a humanized antibody.

[0631] SEQ ID NO:522 is the sequence of the light chain CDR2 of a humanized antibody.

[0632] SEQ ID NO:523 is the sequence of the light chain CDR3 of a humanized antibody.

[0633] SEQ ID NO:524 is the sequence of the light chain variable region of a humanized antibody.

[0634] SEQ ID NO:525 is the sequence of the light chain variable region of a humanized antibody.

[0635] SEQ ID NO:526 is the sequence of the heavy chain CDR1 of a humanized antibody.

[0636] SEQ ID NO:527 is the sequence of the heavy chain CDR2 of a humanized antibody.

[0637] SEQ ID NO:528 is the sequence of the heavy chain CDR3 of a humanized antibody.

[0638] SEQ ID NO:529 is the sequence of the heavy chain variable region of a humanized antibody.

[0639] SEQ ID NO:530 is the sequence of the heavy chain variable region of a humanized antibody.

[0640] SEQ ID NO:531 is the sequence of the light chain CDR1 of a humanized antibody.

[0641] SEQ ID NO:532 is the sequence of the light chain CDR2 of a humanized antibody.

[0642] SEQ ID NO:533 is the sequence of the light chain CDR3 of a humanized antibody.

[0643] SEQ ID NO:534 is the sequence of the light chain variable region of a humanized antibody.

[0644] SEQ ID NO:535 is the sequence of the light chain variable region of a humanized antibody.

[0645] SEQ ID NO:536 is the sequence of a heavy chain for an anti-OX40 monoclonal antibody.

[0646] SEQ ID NO:537 is the sequence of a light chain for an anti-OX40 monoclonal antibody.

[0647] SEQ ID NO:538 is the sequence of the variable region of a heavy chain for an anti-OX40 monoclonal antibody.

[0648] SEQ ID NO:539 is the sequence of the variable region of a light chain for an anti-OX40 monoclonal antibody.

[0649] SEQ ID NO:540 is the sequence of a heavy chain variable region for an anti-OX40 monoclonal antibody.

[0650] SEQ ID NO:541 is the sequence of a light chain variable region for an anti-OX40 monoclonal antibody.

[0651] SEQ ID NO:542 is the sequence of a heavy chain CDR1 for an anti-OX40 monoclonal antibody.

[0652] SEQ ID NO:543 is the sequence of a heavy chain CDR2 for an anti-OX40 monoclonal antibody.

[0653] SEQ ID NO:544 is the sequence of a heavy chain CDR3 for an anti-OX40 monoclonal antibody.

[0654] SEQ ID NO:545 is the sequence of a light chain CDR1 for an anti-OX40 monoclonal antibody.

[0655] SEQ ID NO:546 is the sequence of a light chain CDR2 for an anti-OX40 monoclonal antibody.

[0656] SEQ ID NO:547 is the sequence of a light chain CDR3 for an anti-OX40 monoclonal antibody.

[0657] SEQ ID NO:548 is the sequence of a heavy chain variable region for an anti-OX40 monoclonal antibody.

[0658] SEQ ID NO:549 is the sequence of a light chain variable region for an anti-OX40 monoclonal antibody.

[0659] SEQ ID NO:550 is the sequence of a heavy chain CDR1 for an anti-OX40 monoclonal antibody.

[0660] SEQ ID NO:551 is the sequence of a heavy chain CDR2 for an anti-OX40 monoclonal antibody.

[0661] SEQ ID NO:552 is the sequence of a heavy chain CDR3 for an anti-OX40 monoclonal antibody.

[0662] SEQ ID NO:553 is the sequence of a light chain CDR1 for an anti-OX40 monoclonal antibody.

[0663] SEQ ID NO:554 is the sequence of a light chain CDR2 for an anti-OX40 monoclonal antibody.

[0664] SEQ ID NO:555 is the sequence of a light chain CDR3 for an anti-OX40 monoclonal antibody.

[0665] SEQ ID NO:556 is the sequence of a heavy chain variable region for an anti-OX40 monoclonal antibody.

[0666] SEQ ID NO:557 is the sequence of a light chain variable region for an anti-OX40 monoclonal antibody.

[0667] SEQ ID NO:558 is the sequence of a light chain variable region for an anti-OX40 monoclonal antibody.

[0668] SEQ ID NO:559 is the sequence of a heavy chain variable region for an anti-OX40 monoclonal antibody.

[0669] SEQ ID NO:560 is the sequence of a heavy chain variable region for an anti-OX40 monoclonal antibody.

[0670] SEQ ID NO:561 is the sequence of a heavy chain variable region for an anti-OX40 monoclonal antibody.

[0671] SEQ ID NO:562 is the sequence of a light chain variable region for an anti-OX40 monoclonal antibody.

[0672] SEQ ID NO:563 is the sequence of a light chain variable region for an anti-OX40 monoclonal antibody.

[0673] SEQ ID NO:564 is the sequence of a heavy chain variable region for an anti-OX40 monoclonal antibody.

[0674] SEQ ID NO:565 is the sequence of a heavy chain variable region for an anti-OX40 monoclonal antibody.

[0675] SEQ ID NO:566 is the heavy chain amino acid sequence of the anti-CD20 monoclonal antibody rituximab.

[0676] SEQ ID NO:567 is the light chain amino acid sequence of the anti-CD20 monoclonal antibody rituximab.

[0677] SEQ ID NO:568 is the heavy chain amino acid sequence of the anti-CD20 monoclonal antibody obinutuzumab.

[0678] SEQ ID NO:569 is the light chain amino acid sequence of the anti-CD20 monoclonal antibody obinutuzumab.

[0679] SEQ ID NO:570 is the variable heavy chain amino acid sequence of the anti-CD20 monoclonal antibody ofatumumab.

[0680] SEQ ID NO:571 is the variable light chain amino acid sequence of the anti-CD20 monoclonal antibody ofatumumab.

[0681] SEQ ID NO: 572 is the Fab fragment heavy chain amino acid sequence of the anti-CD20 monoclonal antibody ofatumumab.

[0682] SEQ ID NO: 573 is the Fab fragment light chain amino acid sequence of the anti-CD20 monoclonal antibody ofatumumab.

[0683] SEQ ID NO:574 is the heavy chain amino acid sequence of the anti-CD20 monoclonal antibody veltuzumab.

[0684] SEQ ID NO:575 is the light chain amino acid sequence of the anti-CD20 monoclonal antibody veltuzumab.

[0685] SEQ ID NO:576 is the heavy chain amino acid sequence of the anti-CD20 monoclonal antibody tositumomab.

[0686] SEQ ID NO:577 is the light chain amino acid sequence of the anti-CD20 monoclonal antibody tositumomab.

[0687] SEQ ID NO:578 is the heavy chain amino acid sequence of the anti-CD20 monoclonal antibody ibritumomab.

[0688] SEQ ID NO:579 is the light chain amino acid sequence of the anti-CD20 monoclonal antibody ibritumomab.

[0689] SEQ ID NO:580 is the heavy chain amino acid sequence of the PD-1 inhibitor nivolumab.

[0690] SEQ ID NO:581 is the light chain amino acid sequence of the PD-1 inhibitor nivolumab.

[0691] SEQ ID NO:582 is the heavy chain variable region (V_{H}) amino acid sequence of the PD-1 inhibitor nivolumab.

[0692] SEQ ID NO:583 is the light chain variable region (V_{L}) amino acid sequence of the PD-1 inhibitor nivolumab.

[0693] SEQ ID NO:584 is the heavy chain CDR1 amino acid sequence of the PD-1 inhibitor nivolumab.

[0694] SEQ ID NO:585 is the heavy chain CDR2 amino acid sequence of the PD-1 inhibitor nivolumab.

[0695] SEQ ID NO:586 is the heavy chain CDR3 amino acid sequence of the PD-1 inhibitor nivolumab.

[0696] SEQ ID NO:587 is the light chain CDR1 amino acid sequence of the PD-1 inhibitor nivolumab.

[0697] SEQ ID NO:588 is the light chain CDR2 amino acid sequence of the PD-1 inhibitor nivolumab.

[0698] SEQ ID NO:589 is the light chain CDR3 amino acid sequence of the PD-1 inhibitor nivolumab.

[0699] SEQ ID NO:590 is the heavy chain amino acid sequence of the PD-1 inhibitor pembrolizumab.

[0700] SEQ ID NO:591 is the light chain amino acid sequence of the PD-1 inhibitor pembrolizumab.

[0701] SEQ ID NO:592 is the heavy chain variable region (V_{H}) amino acid sequence of the PD-1 inhibitor pembrolizumab.

[0702] SEQ ID NO:593 is the light chain variable region (V_{L}) amino acid sequence of the PD-1 inhibitor pembrolizumab.

[0703] SEQ ID NO:594 is the heavy chain CDR1 amino acid sequence of the PD-1 inhibitor pembrolizumab.

[0704] SEQ ID NO:595 is the heavy chain CDR2 amino acid sequence of the PD-1 inhibitor pembrolizumab.

[0705] SEQ ID NO:596 is the heavy chain CDR3 amino acid sequence of the PD-1 inhibitor pembrolizumab.

[0706] SEQ ID NO:597 is the light chain CDR1 amino acid sequence of the PD-1 inhibitor pembrolizumab.

[0707] SEQ ID NO:598 is the light chain CDR2 amino acid sequence of the PD-1 inhibitor pembrolizumab.

[0708] SEQ ID NO:599 is the light chain CDR3 amino acid sequence of the PD-1 inhibitor pembrolizumab.

[0709] SEQ ID NO:600 is the heavy chain amino acid sequence of the PD-1 inhibitor pidilizumab.

[0710] SEQ ID NO:601 is the light chain amino acid sequence of the PD-1 inhibitor pidilizumab.

[0711] SEQ ID NO:602 is the heavy chain variable region (V_{H}) amino acid sequence of the PD-1 inhibitor pidilizumab.

[0712] SEQ ID NO:603 is the light chain variable region (V_{L}) amino acid sequence of the PD-1 inhibitor pidilizumab.

[0713] SEQ ID NO:604 is the heavy chain amino acid sequence of the PD-L1 inhibitor durvalumab.

[0714] SEQ ID NO:605 is the light chain amino acid sequence of the PD-L1 inhibitor durvalumab.

[0715] SEQ ID NO:606 is the heavy chain variable region (V_{H}) amino acid sequence of the PD-L1 inhibitor durvalumab.

[0716] SEQ ID NO:607 is the light chain variable region (V_{L}) amino acid sequence of the PD-L1 inhibitor durvalumab.

[0717] SEQ ID NO:608 is the heavy chain CDR1 amino acid sequence of the PD-L1 inhibitor durvalumab.

[0718] SEQ ID NO:609 is the heavy chain CDR2 amino acid sequence of the PD-L1 inhibitor durvalumab.

[0719] SEQ ID NO:610 is the heavy chain CDR3 amino acid sequence of the PD-L1 inhibitor durvalumab.

[0720] SEQ ID NO:611 is the light chain CDR1 amino acid sequence of the PD-L1 inhibitor durvalumab.

[0721] SEQ ID NO:612 is the light chain CDR2 amino acid sequence of the PD-L1 inhibitor durvalumab.

[0722] SEQ ID NO:613 is the light chain CDR3 amino acid sequence of the PD-L1 inhibitor durvalumab.

[0723] SEQ ID NO:614 is the heavy chain amino acid sequence of the PD-L1 inhibitor atezolizumab.

[0724] SEQ ID NO:615 is the light chain amino acid sequence of the PD-L1 inhibitor atezolizumab.

[0725] SEQ ID NO:616 is the heavy chain variable region (V_{H}) amino acid sequence of the PD-L1 inhibitor atezolizumab.

[0726] SEQ ID NO:617 is the light chain variable region (V_{L}) amino acid sequence of the PD-L1 inhibitor atezolizumab.

[0727] SEQ ID NO:618 is the heavy chain CDR1 amino acid sequence of the PD-L1 inhibitor atezolizumab.

[0728] SEQ ID NO:619 is the heavy chain CDR2 amino acid sequence of the PD-L1 inhibitor atezolizumab.

[0729] SEQ ID NO:620 is the heavy chain CDR3 amino acid sequence of the PD-L1 inhibitor atezolizumab.

[0730] SEQ ID NO:621 is the light chain CDR1 amino acid sequence of the PD-L1 inhibitor atezolizumab.

[0731] SEQ ID NO:622 is the light chain CDR2 amino acid sequence of the PD-L1 inhibitor atezolizumab.

[0732] SEQ ID NO:623 is the light chain CDR3 amino acid sequence of the PD-L1 inhibitor atezolizumab.

[0733] SEQ ID NO:624 is the heavy chain amino acid sequence of the PD-L1 inhibitor avelumab.

[0734] SEQ ID NO:625 is the light chain amino acid sequence of the PD-L1 inhibitor avelumab.

[0735] SEQ ID NO:626 is the heavy chain variable region (V_{H}) amino acid sequence of the PD-L1 inhibitor avelumab.

[0736] SEQ ID NO:627 is the light chain variable region (V_{L}) amino acid sequence of the PD-L1 inhibitor avelumab.

[0737] SEQ ID NO:628 is the heavy chain CDR1 amino acid sequence of the PD-L1 inhibitor avelumab.

[0738] SEQ ID NO:629 is the heavy chain CDR2 amino acid sequence of the PD-L1 inhibitor avelumab.

[0739] SEQ ID NO:630 is the heavy chain CDR3 amino acid sequence of the PD-L1 inhibitor avelumab.

[0740] SEQ ID NO:631 is the light chain CDR1 amino acid sequence of the PD-L1 inhibitor avelumab.

[0741] SEQ ID NO:632 is the light chain CDR2 amino acid sequence of the PD-L1 inhibitor avelumab.

[0742] SEQ ID NO:633 is the light chain CDR3 amino acid sequence of the PD-L1 inhibitor avelumab.

### DETAILED DESCRIPTION OF THE INVENTION

[0743] Unless defined otherwise, all technical and scientific terms used herein have the same meaning as is commonly understood by one of skill in the art to which this invention belongs. All patents and publications referred to herein are incorporated by reference in their entireties.

### Definitions

[0744] The terms “co-administration,” “co-administering,” “administered in combination with,” “administering in combination with,” “simultaneous,” and “concurrent,” as used herein, encompass administration of two or more active pharmaceutical ingredients (in a preferred embodiment of the present invention, for example, at least one GITR binding molecule and at least one BTK inhibitor) to a subject so that both active pharmaceutical ingredients and/or their metabolites are present in the subject at the same time. Co-administration includes simultaneous administration in separate compositions, administration at different times in separate compositions, or administration in a composition in which two or more active pharmaceutical ingredients are present. Simultaneous administration in separate compositions and administration in a composition in which both agents are present are preferred.

[0745] The term “in vivo” refers to an event that takes place in a subject's body.

[0746] The term “in vitro” refers to an event that takes places outside of a subject's body. In vitro assays encompass cell-based assays in which cells alive or dead are employed and may also encompass a cell-free assay in which no intact cells are employed.

[0747] The term “effective amount” or “therapeutically effective amount” refers to that amount of a compound or combination of compounds as described herein that is sufficient to effect the intended application including, but not limited to, disease treatment. A therapeutically effective amount may vary depending upon the intended application (in vitro or in vivo), or the subject and disease condition being treated (e.g., the weight, age and gender of the subject), the severity of the disease condition, the manner of administration, etc. which can readily be determined by one of ordinary skill in the art. The term also applies to a dose that will induce a particular response in target cells (e.g., the reduction of platelet adhesion and/or cell migration). The specific dose will vary depending on the particular compounds chosen, the dosing regimen to be followed, whether the compound is administered in combination with other compounds, timing of administration, the tissue to which it is administered, and the physical delivery system in which the compound is carried.

[0748] A “therapeutic effect” as that term is used herein, encompasses a therapeutic benefit and/or a prophylactic benefit. A prophylactic effect includes delaying or eliminating the appearance of a disease or condition, delaying or eliminating the onset of symptoms of a disease or condition, slowing, halting, or reversing the progression of a disease or condition, or any combination thereof.

[0749] The terms “QD,” “qd,” or “q.d.” mean quaque die, once a day, or once daily. The terms “BID,” “bid,” or “b.i.d.” mean bis in die, twice a day, or twice daily. The terms “TID,” “tid,” or “t.i.d.” mean ter in die, three times a day, or three times daily. The terms “QID,” “qid,” or “q.i.d.” mean quater in die, four times a day, or four times daily.

[0750] The term “pharmaceutically acceptable salt” refers to salts derived from a variety of organic and inorganic counter ions known in the art. Pharmaceutically acceptable acid addition salts can be formed with inorganic acids and organic acids. Preferred inorganic acids from which salts can be derived include, for example, hydrochloric acid, hydrobromic acid, sulfuric acid, nitric acid and phosphoric acid. Preferred organic acids from which salts can be derived include, for example, acetic acid, propionic acid, glycolic acid, pyruvic acid, oxalic acid, maleic acid, malonic acid, succinic acid, fumaric acid, tartaric acid, citric acid, benzoic acid, cinnamic acid, mandelic acid, methanesulfonic acid, ethanesulfonic acid, p-toluenesulfonic acid and salicylic acid. Pharmaceutically acceptable base addition salts can be formed with inorganic and organic bases. Inorganic bases from which salts can be derived include, for example, sodium, potassium, lithium, ammonium, calcium, magnesium, iron, zinc, copper, manganese and aluminum. Organic bases from which salts can be derived include, for example, primary, secondary, and tertiary amines, substituted amines including naturally occurring substituted amines, cyclic amines and basic ion exchange resins. Specific examples include isopropylamine, trimethylamine, diethylamine, triethylamine, tripropylamine, and ethanolamine. In some embodiments, the pharmaceutically acceptable base addition salt is chosen from ammonium, potassium, sodium, calcium, and magnesium salts. The term “cocrystal” refers to a molecular complex derived from a number of cocrystal formers known in the art. Unlike a salt, a cocrystal typically does not involve hydrogen transfer between the cocrystal and the drug, and instead involves intermolecular interactions, such as hydrogen bonding, aromatic ring stacking, or dispersive forces, between the cocrystal former and the drug in the crystal structure.

[0751] “Pharmaceutically acceptable carrier” or “pharmaceutically acceptable excipient” is intended to include any and all solvents, dispersion media, coatings, antibacterial and antifungal agents, isotonic and absorption delaying agents, and inert ingredients. The use of such pharmaceutically acceptable carriers or pharmaceutically acceptable excipients for active pharmaceutical ingredients is well known in the art. Except insofar as any conventional pharmaceutically acceptable carrier or pharmaceutically acceptable excipient is incompatible with the active pharmaceutical ingredient, its use in the therapeutic compositions of the invention is contemplated. Additional active pharmaceutical ingredients, such as other drugs, can also be incorporated into the described compositions and methods.

[0752] “Prodrug” is intended to describe a compound that may be converted under physiological conditions or by solvolysis to a biologically active compound described herein. Thus, the term “prodrug” refers to a precursor of a biologically active compound that is pharmaceutically acceptable. A prodrug may be inactive when administered to a subject, but is converted in vivo to an active compound, for example, by hydrolysis. The prodrug compound often offers the advantages of solubility, tissue compatibility or delayed release in a mammalian organism (see, e.g., Bundgaard, H., Design of Prodrugs (1985) (Elsevier, Amsterdam). The term “prodrug” is also intended to include any covalently bonded carriers, which release the active compound in vivo when administered to a subject. Prodrugs of an active compound, as described herein, may be prepared by modifying functional groups present in the active compound in such a way that the modifications are cleaved, either in routine manipulation or in vivo, to yield the active parent compound. Prodrugs include, for example, compounds wherein a hydroxy, amino or mercapto group is bonded to any group that, when the prodrug of the active compound is administered to a mammalian subject, cleaves to form a free hydroxy, free amino or free mercapto group, respectively. Examples of prodrugs include, but are not limited to, acetates, formates and benzoate derivatives of an alcohol, various ester derivatives of a carboxylic acid, or acetamide, formamide and benzamide derivatives of an amine functional group in the active compound.

[0753] As used herein, the term “warhead” or “warhead group” refers to a functional group present on a compound of the present invention wherein that functional group is capable of covalently binding to an amino acid residue present in the binding pocket of the target protein (such as cysteine, lysine, histidine, or other residues capable of being covalently modified), thereby irreversibly inhibiting the protein.

[0754] Unless otherwise stated, the chemical structures depicted herein are intended to include compounds which differ only in the presence of one or more isotopically enriched atoms. For example, compounds where one or more hydrogen atoms is replaced by deuterium or tritium, or wherein one or more carbon atoms is replaced by ¹³C- or ¹⁴C-enriched carbons, are within the scope of this invention.

[0755] When ranges are used herein to describe, for example, physical or chemical properties such as molecular weight or chemical formulae, all combinations and subcombinations of ranges and specific embodiments therein are intended to be included. Use of the term “about” when referring to a number or a numerical range means that the number or numerical range referred to is an approximation within experimental variability (or within statistical experimental error), and thus the number or numerical range may vary. The variation is typically from 0% to 15%, preferably from 0% to 10%, more preferably from 0% to 5% of the stated number or numerical range. The term “comprising” (and related terms such as “comprise” or “comprises” or “having” or “including”) includes those embodiments such as, for example, an embodiment of any composition of matter, method or process that “consist of” or “consist essentially of” the described features.

[0756] “Alkyl” refers to a straight or branched hydrocarbon chain radical consisting solely of carbon and hydrogen atoms, containing no unsaturation, having from one to ten carbon atoms (e.g., (C₁₋₁₀)alkyl or C₁₋₁₀ alkyl). Whenever it appears herein, a numerical range such as “1 to 10” refers to each integer in the given range—e.g., “1 to 10 carbon atoms” means that the alkyl group may consist of 1 carbon atom, 2 carbon atoms, 3 carbon atoms, etc., up to and including 10 carbon atoms, although the definition is also intended to cover the occurrence of the term “alkyl” where no numerical range is specifically designated. Typical alkyl groups include, but are in no way limited to, methyl, ethyl, propyl, isopropyl, n-butyl, isobutyl, sec-butyl isobutyl, tertiary butyl, pentyl, isopentyl, neopentyl, hexyl, septyl, octyl, nonyl and decyl. The alkyl moiety may be attached to the rest of the molecule by a single bond, such as for example, methyl (Me), ethyl (Et), n-propyl (Pr), 1-methylethyl (isopropyl), n-butyl, n-pentyl, 1,1-dimethylethyl (t-butyl) and 3-methylhexyl. Unless stated otherwise specifically in the specification, an alkyl group is optionally substituted by one or more of substituents which are independently heteroalkyl, alkenyl, alkynyl, cycloalkyl, heterocycloalkyl, aryl, arylalkyl, heteroaryl, heteroarylalkyl, hydroxy, halo, cyano, trifluoromethyl, trifluoromethoxy, nitro, trimethylsilanyl, —OR^{a}, —SR^{a}, —OC(O)—R^{a}, —N(R^{a})₂, —C(O)R^{a}, —C(O)OR^{a}, —OC(O)N(R^{a})₂, —C(O)N(R^{a})₂, —N(R^{a})C(O)OR^{a}, —N(R^{a})C(O)R^{a}, —N(R^{a})C(O)N(R^{a})₂, N(R^{a})C(NR^{a})N(R^{a})₂, —N(R^{a})S(O)ₜR^{a} (where t is 1 or 2), —S(O)ₜOR^{a} (where t is 1 or 2), —S(O)ₜN(R^{a})₂ (where t is 1 or 2), or PO₃(R^{a})₂ where each R^{a} is independently hydrogen, fluoroalkyl, carbocyclyl, carbocyclylalkyl, aryl, aralkyl, heterocycloalkyl, heterocycloalkylalkyl, heteroaryl or heteroarylalkyl.

[0757] “Alkylaryl” refers to an -(alkyl)aryl radical where aryl and alkyl are as disclosed herein and which are optionally substituted by one or more of the substituents described as suitable substituents for aryl and alkyl respectively.

[0758] “Alkylhetaryl” refers to an -(alkyl)hetaryl radical where hetaryl and alkyl are as disclosed herein and which are optionally substituted by one or more of the substituents described as suitable substituents for aryl and alkyl respectively.

[0759] “Alkylheterocycloalkyl” refers to an -(alkyl) heterocycyl radical where alkyl and heterocycloalkyl are as disclosed herein and which are optionally substituted by one or more of the substituents described as suitable substituents for heterocycloalkyl and alkyl respectively.

[0760] An “alkene” moiety refers to a group consisting of at least two carbon atoms and at least one carbon-carbon double bond, and an “alkyne” moiety refers to a group consisting of at least two carbon atoms and at least one carbon-carbon triple bond. The alkyl moiety, whether saturated or unsaturated, may be branched, straight chain, or cyclic.

[0761] “Alkenyl” refers to a straight or branched hydrocarbon chain radical group consisting solely of carbon and hydrogen atoms, containing at least one double bond, and having from two to ten carbon atoms (i.e., (C₂₋₁₀)alkenyl or C₂₋₁₀ alkenyl). Whenever it appears herein, a numerical range such as “2 to 10” refers to each integer in the given range—e.g., “2 to 10 carbon atoms” means that the alkenyl group may consist of 2 carbon atoms, 3 carbon atoms, etc., up to and including 10 carbon atoms. The alkenyl moiety may be attached to the rest of the molecule by a single bond, such as for example, ethenyl (i.e., vinyl), prop-1-enyl (i.e., allyl), but-1-enyl, pent-1-enyl and penta-1,4-dienyl. Unless stated otherwise specifically in the specification, an alkenyl group is optionally substituted by one or more substituents which are independently alkyl, heteroalkyl, alkenyl, alkynyl, cycloalkyl, heterocycloalkyl, aryl, arylalkyl, heteroaryl, heteroarylalkyl, hydroxy, halo, cyano, trifluoromethyl, trifluoromethoxy, nitro, trimethylsilanyl, —OR^{a}, —SR^{a}, —OC(O)—R^{a}, —N(R^{a})₂, —C(O)R^{a}, —C(O)OR^{a}, —OC(O)N(R^{a})₂, —C(O)N(R^{a})₂, —N(R^{a})C(O)OR^{a}, —N(R^{a})C(O)R^{a}, —N(R^{a})C(O)N(R^{a})₂, N(R^{a})C(NR^{a})N(R^{a})₂, —N(R^{a})S(O)ₜR^{a} (where t is 1 or 2), —S(O)ₜOR^{a} (where t is 1 or 2), —S(O)ₜN(R^{a})₂ (where t is 1 or 2), or PO₃(R^{a})₂, where each R^{a} is independently hydrogen, alkyl, fluoroalkyl, carbocyclyl, carbocyclylalkyl, aryl, aralkyl, heterocycloalkyl, heterocycloalkylalkyl, heteroaryl or heteroarylalkyl.

[0762] “Alkenyl-cycloalkyl” refers to an -(alkenyl)cycloalkyl radical where alkenyl and cycloalkyl are as disclosed herein and which are optionally substituted by one or more of the substituents described as suitable substituents for alkenyl and cycloalkyl respectively.

[0763] “Alkynyl” refers to a straight or branched hydrocarbon chain radical group consisting solely of carbon and hydrogen atoms, containing at least one triple bond, having from two to ten carbon atoms (i.e., (C₂₋₁₀)alkynyl or C₂₋₁₀ alkynyl). Whenever it appears herein, a numerical range such as “2 to 10” refers to each integer in the given range—e.g., “2 to 10 carbon atoms” means that the alkynyl group may consist of 2 carbon atoms, 3 carbon atoms, etc., up to and including 10 carbon atoms. The alkynyl may be attached to the rest of the molecule by a single bond, for example, ethynyl, propynyl, butynyl, pentynyl and hexynyl. Unless stated otherwise specifically in the specification, an alkynyl group is optionally substituted by one or more substituents which independently are: alkyl, heteroalkyl, alkenyl, alkynyl, cycloalkyl, heterocycloalkyl, aryl, arylalkyl, heteroaryl, heteroarylalkyl, hydroxy, halo, cyano, trifluoromethyl, trifluoromethoxy, nitro, trimethylsilanyl, —OR^{a}, —SR^{a}, —OC(O)—R^{a}, —N(R^{a})₂, —C(O)R^{a}, —C(O)OR^{a}, —OC(O)N(R^{a})₂, —C(O)N(R^{a})₂, —N(R^{a})C(O)OR^{a}, —N(R^{a})C(O)R^{a}, —N(R^{a})C(O)N(R^{a})₂, N(R^{a})C(NR^{a})N(R^{a})₂, —N(R^{a})S(O)ₜR^{a} (where t is 1 or 2), —S(O)ₜOR^{a} (where t is 1 or 2), —S(O)ₜN(R^{a})₂ (where t is 1 or 2), or PO₃(R^{a})₂, where each R^{a} independently hydrogen, alkyl, fluoroalkyl, carbocyclyl, carbocyclylalkyl, aryl, aralkyl, heterocycloalkyl, heterocycloalkylalkyl, heteroaryl or heteroarylalkyl.

[0764] “Alkynyl-cycloalkyl” refers to an -(alkynyl)cycloalkyl radical where alkynyl and cycloalkyl are as disclosed herein and which are optionally substituted by one or more of the substituents described as suitable substituents for alkynyl and cycloalkyl respectively.

[0765] “Carboxaldehyde” refers to a —(C═O)H radical.

[0766] “Carboxyl” refers to a —(C═O)OH radical.

[0767] “Cyano” refers to a —CN radical.

[0768] “Cycloalkyl” refers to a monocyclic or polycyclic radical that contains only carbon and hydrogen, and may be saturated, or partially unsaturated. Cycloalkyl groups include groups having from 3 to 10 ring atoms (i.e. (C₃₋₁₀)cycloalkyl or C₃₋₁₀ cycloalkyl). Whenever it appears herein, a numerical range such as “3 to 10” refers to each integer in the given range—e.g., “3 to 10 carbon atoms” means that the cycloalkyl group may consist of 3 carbon atoms, etc., up to and including 10 carbon atoms. Illustrative examples of cycloalkyl groups include, but are not limited to the following moieties: cyclopropyl, cyclobutyl, cyclopentyl, cyclopentenyl, cyclohexyl, cyclohexenyl, cycloheptyl, cyclooctyl, cyclononyl, cyclodecyl, norbornyl, and the like. Unless stated otherwise specifically in the specification, a cycloalkyl group is optionally substituted by one or more substituents which independently are: alkyl, heteroalkyl, alkenyl, alkynyl, cycloalkyl, heterocycloalkyl, aryl, arylalkyl, heteroaryl, heteroarylalkyl, hydroxy, halo, cyano, trifluoromethyl, trifluoromethoxy, nitro, trimethylsilanyl, —OR^{a}, —SR^{a}, —OC(O)—R^{a}, —N(R^{a})₂, —C(O)R^{a}, —C(O)OR^{a}, —OC(O)N(R^{a})₂, —C(O)N(R^{a})₂, —N(R^{a})C(O)OR^{a}, —N(R^{a})C(O)R^{a}, —N(R^{a})C(O)N(R^{a})₂, N(R^{a})C(NR^{a})N(R^{a})₂, —N(R^{a})S(O)ₜR^{a} (where t is 1 or 2), —S(O)ₜOR^{a} (where t is 1 or 2), —S(O)ₜN(R^{a})₂ (where t is 1 or 2), or PO₃(R^{a})₂, where each R^{a} is independently hydrogen, alkyl, fluoroalkyl, carbocyclyl, carbocyclylalkyl, aryl, aralkyl, heterocycloalkyl, heterocycloalkylalkyl, heteroaryl or heteroarylalkyl.

[0769] “Cycloalkyl-alkenyl” refers to a -(cycloalkyl)alkenyl radical where cycloalkyl and alkenyl are as disclosed herein and which are optionally substituted by one or more of the substituents described as suitable substituents for cycloalkyl and alkenyl, respectively.

[0770] “Cycloalkyl-heterocycloalkyl” refers to a -(cycloalkyl)heterocycloalkyl radical where cycloalkyl and heterocycloalkyl are as disclosed herein and which are optionally substituted by one or more of the substituents described as suitable substituents for cycloalkyl and heterocycloalkyl, respectively.

[0771] “Cycloalkyl-heteroaryl” refers to a -(cycloalkyl)heteroaryl radical where cycloalkyl and heteroaryl are as disclosed herein and which are optionally substituted by one or more of the substituents described as suitable substituents for cycloalkyl and heteroaryl, respectively.

[0772] The term “alkoxy” refers to the group —O-alkyl, including from 1 to 8 carbon atoms of a straight, branched, cyclic configuration and combinations thereof attached to the parent structure through an oxygen. Examples include, but are not limited to, methoxy, ethoxy, propoxy, isopropoxy, cyclopropyloxy and cyclohexyloxy. “Lower alkoxy” refers to alkoxy groups containing one to six carbons.

[0773] The term “substituted alkoxy” refers to alkoxy wherein the alkyl constituent is substituted (i.e., —O-(substituted alkyl)). Unless stated otherwise specifically in the specification, the alkyl moiety of an alkoxy group is optionally substituted by one or more substituents which independently are: alkyl, heteroalkyl, alkenyl, alkynyl, cycloalkyl, heterocycloalkyl, aryl, arylalkyl, heteroaryl, heteroarylalkyl, hydroxy, halo, cyano, trifluoromethyl, trifluoromethoxy, nitro, trimethylsilanyl, —OR^{a}, —SR^{a}, —OC(O)—R^{a}, —N(R^{a})₂, —C(O)R^{a}, —C(O)OR^{a}, —OC(O)N(R^{a})₂, —C(O)N(R^{a})₂, —N(R^{a})C(O)OR^{a}, —N(R^{a})C(O)R^{a}, —N(R^{a})C(O)N(R^{a})₂, N(R^{a})C(NR^{a})N(R^{a})₂, —N(R^{a})S(O)ₜR^{a} (where t is 1 or 2), —S(O)ₜOR^{a} (where t is 1 or 2), —S(O)ₜN(R^{a})₂ (where t is 1 or 2), or PO₃(R^{a})₂, where each R^{a} is independently hydrogen, alkyl, fluoroalkyl, carbocyclyl, carbocyclylalkyl, aryl, aralkyl, heterocycloalkyl, heterocycloalkylalkyl, heteroaryl or heteroarylalkyl.

[0774] The term “alkoxycarbonyl” refers to a group of the formula (alkoxy)(C═O)-attached through the carbonyl carbon wherein the alkoxy group has the indicated number of carbon atoms. Thus a (C₁₋₆)alkoxycarbonyl group is an alkoxy group having from 1 to 6 carbon atoms attached through its oxygen to a carbonyl linker. “Lower alkoxycarbonyl” refers to an alkoxycarbonyl group wherein the alkoxy group is a lower alkoxy group.

[0775] The term “substituted alkoxycarbonyl” refers to the group (substituted alkyl)-O—C(O)— wherein the group is attached to the parent structure through the carbonyl functionality. Unless stated otherwise specifically in the specification, the alkyl moiety of an alkoxycarbonyl group is optionally substituted by one or more substituents which independently are: alkyl, heteroalkyl, alkenyl, alkynyl, cycloalkyl, heterocycloalkyl, aryl, arylalkyl, heteroaryl, heteroarylalkyl, hydroxy, halo, cyano, trifluoromethyl, trifluoromethoxy, nitro, trimethylsilanyl, —OR^{a}, —SR^{a}, —OC(O)—R^{a}, —N(R^{a})₂, —C(O)R^{a}, —C(O)OR^{a}, —OC(O)N(R^{a})₂, —C(O)N(R^{a})₂, —N(R^{a})C(O)OR^{a}, —N(R^{a})C(O)R^{a}, —N(R^{a})C(O)N(R^{a})₂, N(R^{a})C(NR^{a})N(R^{a})₂, —N(R^{a})S(O)ₜR^{a} (where t is 1 or 2), —S(O)ₜOR^{a} (where t is 1 or 2), —S(O)ₜN(R^{a})₂ (where t is 1 or 2), or PO₃(R^{a})₂, where each R^{a} is independently hydrogen, alkyl, fluoroalkyl, carbocyclyl, carbocyclylalkyl, aryl, aralkyl, heterocycloalkyl, heterocycloalkylalkyl, heteroaryl or heteroarylalkyl.

[0776] “Acyl” refers to the groups (alkyl)-C(O)—, (aryl)-C(O)—, (heteroaryl)-C(O)—, (heteroalkyl)-C(O)— and (heterocycloalkyl)-C(O)—, wherein the group is attached to the parent structure through the carbonyl functionality. If the R radical is heteroaryl or heterocycloalkyl, the hetero ring or chain atoms contribute to the total number of chain or ring atoms. Unless stated otherwise specifically in the specification, the alkyl, aryl or heteroaryl moiety of the acyl group is optionally substituted by one or more substituents which are independently alkyl, heteroalkyl, alkenyl, alkynyl, cycloalkyl, heterocycloalkyl, aryl, arylalkyl, heteroaryl, heteroarylalkyl, hydroxy, halo, cyano, trifluoromethyl, trifluoromethoxy, nitro, trimethylsilanyl, —OR^{a}, —SR^{a}, —OC(O)—R^{a}, —N(R^{a})₂, —C(O)R^{a}, —C(O)OR^{a}, —OC(O)N(R^{a})₂, —C(O)N(R^{a})₂, —N(R^{a})C(O)OR^{a}, —N(R^{a})C(O)R^{a}, —N(R^{a})C(O)N(R^{a})₂, N(R^{a})C(NR^{a})N(R^{a})₂, —N(R^{a})S(O)ₜR^{a} (where t is 1 or 2), —S(O)ₜOR^{a} (where t is 1 or 2), —S(O)ₜN(R^{a})₂ (where t is 1 or 2), or PO₃(R^{a})₂, where each R^{a} is independently hydrogen, alkyl, fluoroalkyl, carbocyclyl, carbocyclylalkyl, aryl, aralkyl, heterocycloalkyl, heterocycloalkylalkyl, heteroaryl or heteroarylalkyl.

[0777] “Acyloxy” refers to a R(C═O)O— radical wherein R is alkyl, aryl, heteroaryl, heteroalkyl or heterocycloalkyl, which are as described herein. If the R radical is heteroaryl or heterocycloalkyl, the hetero ring or chain atoms contribute to the total number of chain or ring atoms. Unless stated otherwise specifically in the specification, the R of an acyloxy group is optionally substituted by one or more substituents which independently are: alkyl, heteroalkyl, alkenyl, alkynyl, cycloalkyl, heterocycloalkyl, aryl, arylalkyl, heteroaryl, heteroarylalkyl, hydroxy, halo, cyano, trifluoromethyl, trifluoromethoxy, nitro, trimethylsilanyl, —OR^{a}, —SR^{a}, —OC(O)—R^{a}, —N(R^{a})₂, —C(O)R^{a}, —C(O)OR^{a}, —OC(O)N(R^{a})₂, —C(O)N(R^{a})₂, —N(R^{a})C(O)OR^{a}, —N(R^{a})C(O)R^{a}, —N(R^{a})C(O)N(R^{a})₂, N(R^{a})C(NR^{a})N(R^{a})₂, —N(R^{a})S(O)ₜR^{a} (where t is 1 or 2), —S(O)ₜOR^{a} (where t is 1 or 2), —S(O)ₜN(R^{a})₂ (where t is 1 or 2), or PO₃(R^{a})₂, where each R^{a} is independently hydrogen, alkyl, fluoroalkyl, carbocyclyl, carbocyclylalkyl, aryl, aralkyl, heterocycloalkyl, heterocycloalkylalkyl, heteroaryl or heteroarylalkyl.

[0778] “Amino” or “amine” refers to a —N(R^{a})₂ radical group, where each R^{a} is independently hydrogen, alkyl, fluoroalkyl, carbocyclyl, carbocyclylalkyl, aryl, aralkyl, heterocycloalkyl, heterocycloalkylalkyl, heteroaryl or heteroarylalkyl, unless stated otherwise specifically in the specification. When a —N(R^{a})₂ group has two R^{a} substituents other than hydrogen, they can be combined with the nitrogen atom to form a 4-, 5-, 6- or 7-membered ring. For example, —N(R^{a})₂ is intended to include, but is not limited to, 1-pyrrolidinyl and 4-morpholinyl. Unless stated otherwise specifically in the specification, an amino group is optionally substituted by one or more substituents which independently are: alkyl, heteroalkyl, alkenyl, alkynyl, cycloalkyl, heterocycloalkyl, aryl, arylalkyl, heteroaryl, heteroarylalkyl, hydroxy, halo, cyano, trifluoromethyl, trifluoromethoxy, nitro, trimethylsilanyl, —OR^{a}, —SR^{a}, —OC(O)—R^{a}, —N(R^{a})₂, —C(O)R^{a}, —C(O)OR^{a}, —OC(O)N(R^{a})₂, —C(O)N(R^{a})₂, —N(R^{a})C(O)OR^{a}, —N(R^{a})C(O)R^{a}, —N(R^{a})C(O)N(R^{a})₂, N(R^{a})C(NR^{a})N(R^{a})₂, —N(R^{a})S(O)ₜR^{a} (where t is 1 or 2), —S(O)ₜOR^{a} (where t is 1 or 2), —S(O)ₜN(R^{a})₂ (where t is 1 or 2), or PO₃(R^{a})₂, where each R^{a} is independently hydrogen, alkyl, fluoroalkyl, carbocyclyl, carbocyclylalkyl, aryl, aralkyl, heterocycloalkyl, heterocycloalkylalkyl, heteroaryl or heteroarylalkyl.

[0779] The term “substituted amino” also refers to N-oxides of the groups —NHR^{d}, and NR^{d}R^{d} each as described above. N-oxides can be prepared by treatment of the corresponding amino group with, for example, hydrogen peroxide or m-chloroperoxybenzoic acid.

[0780] “Amide” or “amido” refers to a chemical moiety with formula —C(O)N(R)₂ or —NHC(O)R, where R is selected from the group consisting of hydrogen, alkyl, cycloalkyl, aryl, heteroaryl (bonded through a ring carbon) and heteroalicyclic (bonded through a ring carbon), each of which moiety may itself be optionally substituted. The R₂ of —N(R)₂ of the amide may optionally be taken together with the nitrogen to which it is attached to form a 4-, 5-, 6- or 7-membered ring. Unless stated otherwise specifically in the specification, an amido group is optionally substituted independently by one or more of the substituents as described herein for alkyl, cycloalkyl, aryl, heteroaryl, or heterocycloalkyl. An amide may be an amino acid or a peptide molecule attached to a compound disclosed herein, thereby forming a prodrug. The procedures and specific groups to make such amides are known to those of skill in the art and can readily be found in seminal sources such as Greene and Wuts, Protective Groups in Organic Synthesis, 3^{rd} Ed., John Wiley & Sons, New York, N.Y., 1999, which is incorporated herein by reference in its entirety.

[0781] “Aromatic” or “aryl” or “Ar” refers to an aromatic radical with six to ten ring atoms (e.g., C₆-C₁₀ aromatic or C₆-C₁₀ aryl) which has at least one ring having a conjugated pi electron system which is carbocyclic (e.g., phenyl, fluorenyl, and naphthyl). Bivalent radicals formed from substituted benzene derivatives and having the free valences at ring atoms are named as substituted phenylene radicals. Bivalent radicals derived from univalent polycyclic hydrocarbon radicals whose names end in “-yl” by removal of one hydrogen atom from the carbon atom with the free valence are named by adding “-idene” to the name of the corresponding univalent radical, e.g., a naphthyl group with two points of attachment is termed naphthylidene. Whenever it appears herein, a numerical range such as “6 to 10” refers to each integer in the given range; e.g., “6 to 10 ring atoms” means that the aryl group may consist of 6 ring atoms, 7 ring atoms, etc., up to and including 10 ring atoms. The term includes monocyclic or fused-ring polycyclic (i.e., rings which share adjacent pairs of ring atoms) groups. Unless stated otherwise specifically in the specification, an aryl moiety is optionally substituted by one or more substituents which are independently alkyl, heteroalkyl, alkenyl, alkynyl, cycloalkyl, heterocycloalkyl, aryl, arylalkyl, heteroaryl, heteroarylalkyl, hydroxy, halo, cyano, trifluoromethyl, trifluoromethoxy, nitro, trimethylsilanyl, —OR^{a}, —SR^{a}, —OC(O)—R^{a}, —N(R^{a})₂, —C(O)R^{a}, —C(O)OR^{a}, —OC(O)N(R^{a})₂, —C(O)N(R^{a})₂, —N(R^{a})C(O)OR^{a}, —N(R^{a})C(O)R^{a}, —N(R^{a})C(O)N(R^{a})₂, N(R^{a})C(NR^{a})N(R^{a})₂, —N(R^{a})S(O)ₜR^{a} (where t is 1 or 2), —S(O)ₜOR^{a} (where t is 1 or 2), —S(O)ₜN(R^{a})₂ (where t is 1 or 2), or PO₃(R^{a})₂, where each R^{a} is independently hydrogen, alkyl, fluoroalkyl, carbocyclyl, carbocyclylalkyl, aryl, aralkyl, heterocycloalkyl, heterocycloalkylalkyl, heteroaryl or heteroarylalkyl.

[0782] “Aralkyl” or “arylalkyl” refers to an (aryl)alkyl-radical where aryl and alkyl are as disclosed herein and which are optionally substituted by one or more of the substituents described as suitable substituents for aryl and alkyl respectively.

[0783] “Ester” refers to a chemical radical of formula —COOR, where R is selected from the group consisting of alkyl, cycloalkyl, aryl, heteroaryl (bonded through a ring carbon) and heteroalicyclic (bonded through a ring carbon). The procedures and specific groups to make esters are known to those of skill in the art and can readily be found in seminal sources such as Greene and Wuts, Protective Groups in Organic Synthesis, 3^{rd} Ed., John Wiley & Sons, New York, N.Y., 1999, which is incorporated herein by reference in its entirety. Unless stated otherwise specifically in the specification, an ester group is optionally substituted by one or more substituents which independently are: alkyl, heteroalkyl, alkenyl, alkynyl, cycloalkyl, heterocycloalkyl, aryl, arylalkyl, heteroaryl, heteroarylalkyl, hydroxy, halo, cyano, trifluoromethyl, trifluoromethoxy, nitro, trimethylsilanyl, —OR^{a}, —SR^{a}, —OC(O)—R^{a}, —N(R^{a})₂, —C(O)R^{a}, —C(O)OR^{a}, —OC(O)N(R^{a})₂, —C(O)N(R^{a})₂, —N(R^{a})C(O)OR^{a}, —N(R^{a})C(O)R^{a}, —N(R^{a})C(O)N(R^{a})₂, N(R^{a})C(NR^{a})N(R^{a})₂, —N(R^{a})S(O)ₜR^{a} (where t is 1 or 2), —S(O)ₜOR^{a} (where t is 1 or 2), —S(O)ₜN(R^{a})₂ (where t is 1 or 2), or PO₃(R^{a})₂, where each R^{a} is independently hydrogen, alkyl, fluoroalkyl, carbocyclyl, carbocyclylalkyl, aryl, aralkyl, heterocycloalkyl, heterocycloalkylalkyl, heteroaryl or heteroarylalkyl.

[0784] “Fluoroalkyl” refers to an alkyl radical, as defined above, that is substituted by one or more fluoro radicals, as defined above, for example, trifluoromethyl, difluoromethyl, 2,2,2-trifluoroethyl, 1-fluoromethyl-2-fluoroethyl, and the like. The alkyl part of the fluoroalkyl radical may be optionally substituted as defined above for an alkyl group.

[0785] “Halo,” “halide,” or, alternatively, “halogen” is intended to mean fluoro, chloro, bromo or iodo. The terms “haloalkyl,” “haloalkenyl,” “haloalkynyl,” and “haloalkoxy” include alkyl, alkenyl, alkynyl and alkoxy structures that are substituted with one or more halo groups or with combinations thereof. For example, the terms “fluoroalkyl” and “fluoroalkoxy” include haloalkyl and haloalkoxy groups, respectively, in which the halo is fluorine.

[0786] “Heteroalkyl,” “heteroalkenyl,” and “heteroalkynyl” refer to optionally substituted alkyl, alkenyl and alkynyl radicals and which have one or more skeletal chain atoms selected from an atom other than carbon, e.g., oxygen, nitrogen, sulfur, phosphorus or combinations thereof. A numerical range may be given—e.g., C₁-C₄ heteroalkyl which refers to the chain length in total, which in this example is 4 atoms long. A heteroalkyl group may be substituted with one or more substituents which independently are: alkyl, heteroalkyl, alkenyl, alkynyl, cycloalkyl, heterocycloalkyl, aryl, arylalkyl, heteroaryl, heteroarylalkyl, hydroxy, halo, cyano, nitro, oxo, thioxo, trimethylsilanyl, —OR^{a}, —SR^{a}, —OC(O)—R^{a}, —N(R^{a})₂, —C(O)R^{a}, —C(O)OR^{a}, —OC(O)N(R^{a})₂, —C(O)N(R^{a})₂, —N(R^{a})C(O)OR^{a}, —N(R^{a})C(O)R^{a}, —N(R^{a})C(O)N(R^{a})₂, N(R^{a})C(NR^{a})N(R^{a})₂, —N(R^{a})S(O)ₜR^{a} (where t is 1 or 2), —S(O)ₜOR^{a} (where t is 1 or 2), —S(O)ₜN(R^{a})₂ (where t is 1 or 2), or PO₃(R^{a})₂, where each R^{a} is independently hydrogen, alkyl, fluoroalkyl, carbocyclyl, carbocyclylalkyl, aryl, aralkyl, heterocycloalkyl, heterocycloalkylalkyl, heteroaryl or heteroarylalkyl.

[0787] “Heteroalkylaryl” refers to an -(heteroalkyl)aryl radical where heteroalkyl and aryl are as disclosed herein and which are optionally substituted by one or more of the substituents described as suitable substituents for heteroalkyl and aryl, respectively.

[0788] “Heteroalkylheteroaryl” refers to an -(heteroalkyl)heteroaryl radical where heteroalkyl and heteroaryl are as disclosed herein and which are optionally substituted by one or more of the substituents described as suitable substituents for heteroalkyl and heteroaryl, respectively.

[0789] “Heteroalkylheterocycloalkyl” refers to an -(heteroalkyl)heterocycloalkyl radical where heteroalkyl and heterocycloalkyl are as disclosed herein and which are optionally substituted by one or more of the substituents described as suitable substituents for heteroalkyl and heterocycloalkyl, respectively.

[0790] “Heteroalkylcycloalkyl” refers to an -(heteroalkyl)cycloalkyl radical where heteroalkyl and cycloalkyl are as disclosed herein and which are optionally substituted by one or more of the substituents described as suitable substituents for heteroalkyl and cycloalkyl, respectively.

[0791] “Heteroaryl” or “heteroaromatic” or “HetAr” refers to a 5- to 18-membered aromatic radical (e.g., C₅-C₁₃ heteroaryl) that includes one or more ring heteroatoms selected from nitrogen, oxygen and sulfur, and which may be a monocyclic, bicyclic, tricyclic or tetracyclic ring system. Whenever it appears herein, a numerical range such as “5 to 18” refers to each integer in the given range—e.g., “5 to 18 ring atoms” means that the heteroaryl group may consist of 5 ring atoms, 6 ring atoms, etc., up to and including 18 ring atoms. Bivalent radicals derived from univalent heteroaryl radicals whose names end in “-yl” by removal of one hydrogen atom from the atom with the free valence are named by adding “-idene” to the name of the corresponding univalent radical—e.g., a pyridyl group with two points of attachment is a pyridylidene. A N-containing “heteroaromatic” or “heteroaryl” moiety refers to an aromatic group in which at least one of the skeletal atoms of the ring is a nitrogen atom. The polycyclic heteroaryl group may be fused or non-fused. The heteroatom(s) in the heteroaryl radical are optionally oxidized. One or more nitrogen atoms, if present, are optionally quaternized. The heteroaryl may be attached to the rest of the molecule through any atom of the ring(s). Examples of heteroaryls include, but are not limited to, azepinyl, acridinyl, benzimidazolyl, benzindolyl, 1,3-benzodioxolyl, benzofuranyl, benzooxazolyl, benzo[d]thiazolyl, benzothiadiazolyl, benzo[b][1,4]dioxepinyl, benzo[b][1,4]oxazinyl, 1,4-benzodioxanyl, benzonaphthofuranyl, benzoxazolyl, benzodioxolyl, benzodioxinyl, benzoxazolyl, benzopyranyl, benzopyranonyl, benzofuranyl, benzofuranonyl, benzofurazanyl, benzothiazolyl, benzothienyl(benzothiophenyl), benzothieno[3,2-d]pyrimidinyl, benzotriazolyl, benzo[4,6]imidazo[1,2-a]pyridinyl, carbazolyl, cinnolinyl, cyclopenta[d]pyrimidinyl, 6,7-dihydro-5H-cyclopenta[4,5]thieno[2,3-d]pyrimidinyl, 5,6-dihydrobenzo[h]quinazolinyl, 5,6-dihydrobenzo[h]cinnolinyl, 6,7-dihydro-5H-benzo[6,7]cyclohepta[1,2-c]pyridazinyl, dibenzofuranyl, dibenzothiophenyl, furanyl, furazanyl, furanonyl, furo[3,2-c]pyridinyl, 5,6,7,8,9,10-hexahydrocycloocta[d]pyrimidinyl, 5,6,7,8,9,10-hexahydrocycloocta[d]pyridazinyl, 5,6,7,8,9,10-hexahydrocycloocta[d]pyridinyl, isothiazolyl, imidazolyl, indazolyl, indolyl, indazolyl, isoindolyl, indolinyl, isoindolinyl, isoquinolyl, indolizinyl, isoxazolyl, 5,8-methano-5,6,7,8-tetrahydroquinazolinyl, naphthyridinyl, 1,6-naphthyridinonyl, oxadiazolyl, 2-oxoazepinyl, oxazolyl, oxiranyl, 5,6,6a,7,8,9,10,10a-octahydrobenzo[h]quinazolinyl, 1-phenyl-1H-pyrrolyl, phenazinyl, phenothiazinyl, phenoxazinyl, phthalazinyl, pteridinyl, purinyl, pyranyl, pyrrolyl, pyrazolyl, pyrazolo[3,4-d]pyrimidinyl, pyridinyl, pyrido[3,2-d]pyrimidinyl, pyrido[3,4-d]pyrimidinyl, pyrazinyl, pyrimidinyl, pyridazinyl, pyrrolyl, quinazolinyl, quinoxalinyl, quinolinyl, isoquinolinyl, tetrahydroquinolinyl, 5,6,7,8-tetrahydroquinazolinyl, 5,6,7,8-tetrahydrobenzo[4,5]thieno[2,3-d]pyrimidinyl, 6,7,8,9-tetrahydro-5H-cyclohepta[4,5]thieno[2,3-d]pyrimidinyl, 5,6,7,8-tetrahydropyrido[4,5-c]pyridazinyl, thiazolyl, thiadiazolyl, thiapyranyl, triazolyl, tetrazolyl, triazinyl, thieno[2,3-d]pyrimidinyl, thieno[3,2-d]pyrimidinyl, thieno[2,3-c]pyridinyl, and thiophenyl (i.e., thienyl). Unless stated otherwise specifically in the specification, a heteroaryl moiety is optionally substituted by one or more substituents which are independently: alkyl, heteroalkyl, alkenyl, alkynyl, cycloalkyl, heterocycloalkyl, aryl, arylalkyl, heteroaryl, heteroarylalkyl, hydroxy, halo, cyano, nitro, oxo, thioxo, trimethylsilanyl, —OR^{a}, —SR^{a}, —OC(O)—R^{a}, —N(R^{a})₂, —C(O)R^{a}, —C(O)OR^{a}, —OC(O)N(R^{a})₂, —C(O)N(R^{a})₂, —N(R^{a})C(O)OR^{a}, —N(R^{a})C(O)R^{a}, —N(R^{a})C(O)N(R^{a})₂, N(R^{a})C(NR^{a})N(R^{a})₂, —N(R^{a})S(O)ₜR^{a} (where t is 1 or 2), —S(O)ₜOR^{a} (where t is 1 or 2), —S(O)ₜN(R^{a})₂ (where t is 1 or 2), or PO₃(R^{a})₂, where each R^{a} is independently hydrogen, alkyl, fluoroalkyl, carbocyclyl, carbocyclylalkyl, aryl, aralkyl, heterocycloalkyl, heterocycloalkylalkyl, heteroaryl or heteroarylalkyl.

[0792] Substituted heteroaryl also includes ring systems substituted with one or more oxide (—O—) substituents, such as, for example, pyridinyl N-oxides.

[0793] “Heteroarylalkyl” refers to a moiety having an aryl moiety, as described herein, connected to an alkylene moiety, as described herein, wherein the connection to the remainder of the molecule is through the alkylene group.

[0794] “Heterocycloalkyl” refers to a stable 3- to 18-membered non-aromatic ring radical that comprises two to twelve carbon atoms and from one to six heteroatoms selected from nitrogen, oxygen and sulfur. Whenever it appears herein, a numerical range such as “3 to 18” refers to each integer in the given range—e.g., “3 to 18 ring atoms” means that the heterocycloalkyl group may consist of 3 ring atoms, 4 ring atoms, etc., up to and including 18 ring atoms. Unless stated otherwise specifically in the specification, the heterocycloalkyl radical is a monocyclic, bicyclic, tricyclic or tetracyclic ring system, which may include fused or bridged ring systems. The heteroatoms in the heterocycloalkyl radical may be optionally oxidized. One or more nitrogen atoms, if present, are optionally quaternized. The heterocycloalkyl radical is partially or fully saturated. The heterocycloalkyl may be attached to the rest of the molecule through any atom of the ring(s). Examples of such heterocycloalkyl radicals include, but are not limited to, dioxolanyl, thienyl[1,3]dithianyl, decahydroisoquinolyl, imidazolinyl, imidazolidinyl, isothiazolidinyl, isoxazolidinyl, morpholinyl, octahydroindolyl, octahydroisoindolyl, 2-oxopiperazinyl, 2-oxopiperidinyl, 2-oxopyrrolidinyl, oxazolidinyl, piperidinyl, piperazinyl, 4-piperidonyl, pyrrolidinyl, pyrazolidinyl, quinuclidinyl, thiazolidinyl, tetrahydrofuryl, trithianyl, tetrahydropyranyl, thiomorpholinyl, thiamorpholinyl, 1-oxo-thiomorpholinyl, and 1,1-dioxo-thiomorpholinyl. Unless stated otherwise specifically in the specification, a heterocycloalkyl moiety is optionally substituted by one or more substituents which independently are: alkyl, heteroalkyl, alkenyl, alkynyl, cycloalkyl, heterocycloalkyl, aryl, arylalkyl, heteroaryl, heteroarylalkyl, hydroxy, halo, cyano, nitro, oxo, thioxo, trimethylsilanyl, —OR^{a}, —SR^{a}, —OC(O)—R^{a}, —N(R^{a})₂, —C(O)R^{a}, —C(O)OR^{a}, —OC(O)N(R^{a})₂, —C(O)N(R^{a})₂, —N(R^{a})C(O)OR^{a}, —N(R^{a})C(O)R^{a}, —N(R^{a})C(O)N(R^{a})₂, N(R^{a})C(NR^{a})N(R^{a})₂, —N(R^{a})S(O)ₜR^{a} (where t is 1 or 2), —S(O)ₜOR^{a} (where t is 1 or 2), —S(O)ₜN(R^{a})₂ (where t is 1 or 2), or PO₃(R^{a})₂, where each R^{a} is independently hydrogen, alkyl, fluoroalkyl, carbocyclyl, carbocyclylalkyl, aryl, aralkyl, heterocycloalkyl, heterocycloalkylalkyl, heteroaryl or heteroarylalkyl.

[0795] “Heterocycloalkyl” also includes bicyclic ring systems wherein one non-aromatic ring, usually with 3 to 7 ring atoms, contains at least 2 carbon atoms in addition to 1-3 heteroatoms independently selected from oxygen, sulfur, and nitrogen, as well as combinations comprising at least one of the foregoing heteroatoms; and the other ring, usually with 3 to 7 ring atoms, optionally contains 1-3 heteroatoms independently selected from oxygen, sulfur, and nitrogen and is not aromatic.

[0796] “Nitro” refers to the —NO₂ radical.

[0797] “Oxa” refers to the —O— radical.

[0798] “Oxo” refers to the ═O radical.

[0799] “Isomers” are different compounds that have the same molecular formula. “Stereoisomers” are isomers that differ only in the way the atoms are arranged in space—i.e., having a different stereochemical configuration. “Enantiomers” are a pair of stereoisomers that are non-superimposable mirror images of each other. A 1:1 mixture of a pair of enantiomers is a “racemic” mixture. The term “(±)” is used to designate a racemic mixture where appropriate. “Diastereoisomers” are stereoisomers that have at least two asymmetric atoms, but which are not mirror-images of each other. The absolute stereochemistry is specified according to the Cahn-Ingold-Prelog R—S system. When a compound is a pure enantiomer the stereochemistry at each chiral carbon can be specified by either (R) or (S). Resolved compounds whose absolute configuration is unknown can be designated (+) or (−) depending on the direction (dextro- or levorotatory) which they rotate plane polarized light at the wavelength of the sodium D line. Certain of the compounds described herein contain one or more asymmetric centers and can thus give rise to enantiomers, diastereomers, and other stereoisomeric forms that can be defined, in terms of absolute stereochemistry, as (R) or (S). The present chemical entities, pharmaceutical compositions and methods are meant to include all such possible isomers, including racemic mixtures, optically pure forms and intermediate mixtures. Optically active (R)- and (S)-isomers can be prepared using chiral synthons or chiral reagents, or resolved using conventional techniques. When the compounds described herein contain olefinic double bonds or other centers of geometric asymmetry, and unless specified otherwise, it is intended that the compounds include both E and Z geometric isomers.

[0800] “Enantiomeric purity” as used herein refers to the relative amounts, expressed as a percentage, of the presence of a specific enantiomer relative to the other enantiomer. For example, if a compound, which may potentially have an (R)- or an (S)-isomeric configuration, is present as a racemic mixture, the enantiomeric purity is about 50% with respect to either the (R)- or (S)-isomer. If that compound has one isomeric form predominant over the other, for example, 80% (S)-isomer and 20% (R)-isomer, the enantiomeric purity of the compound with respect to the (S)-isomeric form is 80%. The enantiomeric purity of a compound can be determined in a number of ways known in the art, including but not limited to chromatography using a chiral support, polarimetric measurement of the rotation of polarized light, nuclear magnetic resonance spectroscopy using chiral shift reagents which include but are not limited to lanthanide containing chiral complexes or Pirkle's reagents, or derivatization of a compounds using a chiral compound such as Mosher's acid followed by chromatography or nuclear magnetic resonance spectroscopy.

[0801] In preferred embodiments, the enantiomerically enriched composition has a higher potency with respect to therapeutic utility per unit mass than does the racemic mixture of that composition. Enantiomers can be isolated from mixtures by methods known to those skilled in the art, including chiral high pressure liquid chromatography (HPLC) and the formation and crystallization of chiral salts; or preferred enantiomers can be prepared by asymmetric syntheses. See, for example, Jacques, et al., Enantiomers, Racemates and Resolutions, Wiley Interscience, New York (1981); E. L. Eliel, Stereochemistry of Carbon Compounds, McGraw-Hill, New York (1962); and E. L. Eliel and S. H. Wilen, Stereochemistry of Organic Compounds, Wiley-Interscience, New York (1994).

[0802] The terms “enantiomerically enriched” and “non-racemic,” as used herein, refer to compositions in which the percent by weight of one enantiomer is greater than the amount of that one enantiomer in a control mixture of the racemic composition (e.g., greater than 1:1 by weight). For example, an enantiomerically enriched preparation of the (S)-enantiomer, means a preparation of the compound having greater than 50% by weight of the (S)-enantiomer relative to the (R)-enantiomer, such as at least 75% by weight, or such as at least 80% by weight. In some embodiments, the enrichment can be significantly greater than 80% by weight, providing a “substantially enantiomerically enriched” or a “substantially non-racemic” preparation, which refers to preparations of compositions which have at least 85% by weight of one enantiomer relative to other enantiomer, such as at least 90% by weight, or such as at least 95% by weight. The terms “enantiomerically pure” or “substantially enantiomerically pure” refers to a composition that comprises at least 98% of a single enantiomer and less than 2% of the opposite enantiomer.

[0803] “Moiety” refers to a specific segment or functional group of a molecule. Chemical moieties are often recognized chemical entities embedded in or appended to a molecule.

[0804] “Tautomers” are structurally distinct isomers that interconvert by tautomerization. “Tautomerization” is a form of isomerization and includes prototropic or proton-shift tautomerization, which is considered a subset of acid-base chemistry. “Prototropic tautomerization” or “proton-shift tautomerization” involves the migration of a proton accompanied by changes in bond order, often the interchange of a single bond with an adjacent double bond. Where tautomerization is possible (e.g., in solution), a chemical equilibrium of tautomers can be reached. An example of tautomerization is keto-enol tautomerization. A specific example of keto-enol tautomerization is the interconversion of pentane-2,4-dione and 4-hydroxypent-3-en-2-one tautomers. Another example of tautomerization is phenol-keto tautomerization. A specific example of phenol-keto tautomerization is the interconversion of pyridin-4-ol and pyridin-4(1H)-one tautomers.

[0805] A “leaving group or atom” is any group or atom that will, under selected reaction conditions, cleave from the starting material, thus promoting reaction at a specified site. Examples of such groups, unless otherwise specified, include halogen atoms and mesyloxy, p-nitrobenzensulphonyloxy and tosyloxy groups.

[0806] “Protecting group” is intended to mean a group that selectively blocks one or more reactive sites in a multifunctional compound such that a chemical reaction can be carried out selectively on another unprotected reactive site and the group can then be readily removed or deprotected after the selective reaction is complete. A variety of protecting groups are disclosed, for example, in T. H. Greene and P. G. M. Wuts, Protective Groups in Organic Synthesis, Third Edition, John Wiley & Sons, New York (1999).

[0807] “Solvate” refers to a compound in physical association with one or more molecules of a pharmaceutically acceptable solvent.

[0808] “Substituted” means that the referenced group may have attached one or more additional groups, radicals or moieties individually and independently selected from, for example, acyl, alkyl, alkylaryl, cycloalkyl, aralkyl, aryl, carbohydrate, carbonate, heteroaryl, heterocycloalkyl, hydroxy, alkoxy, aryloxy, mercapto, alkylthio, arylthio, cyano, halo, carbonyl, ester, thiocarbonyl, isocyanato, thiocyanato, isothiocyanato, nitro, oxo, perhaloalkyl, perfluoroalkyl, phosphate, silyl, sulfinyl, sulfonyl, sulfonamidyl, sulfoxyl, sulfonate, urea, and amino, including mono- and di-substituted amino groups, and protected derivatives thereof. The substituents themselves may be substituted, for example, a cycloalkyl substituent may itself have a halide substituent at one or more of its ring carbons. The term “optionally substituted” means optional substitution with the specified groups, radicals or moieties.

[0809] “Sulfanyl” refers to groups that include —S-(optionally substituted alkyl), —S-(optionally substituted aryl), —S-(optionally substituted heteroaryl) and —S-(optionally substituted heterocycloalkyl).

[0810] “Sulfinyl” refers to groups that include —S(O)—H, —S(O)-(optionally substituted alkyl), —S(O)-(optionally substituted amino), —S(O)-(optionally substituted aryl), —S(O)-(optionally substituted heteroaryl) and —S(O)-(optionally substituted heterocycloalkyl).

[0811] “Sulfonyl” refers to groups that include —S(O₂)—H, —S(O₂)-(optionally substituted alkyl), —S(O₂)-(optionally substituted amino), —S(O₂)-(optionally substituted aryl), —S(O₂)-(optionally substituted heteroaryl), and —S(O₂)-(optionally substituted heterocycloalkyl).

[0812] “Sulfonamidyl” or “sulfonamido” refers to a —S(═O)₂—NRR radical, where each R is selected independently from the group consisting of hydrogen, alkyl, cycloalkyl, aryl, heteroaryl (bonded through a ring carbon) and heteroalicyclic (bonded through a ring carbon). The R groups in —NRR of the —S(═O)₂—NRR radical may be taken together with the nitrogen to which it is attached to form a 4-, 5-, 6- or 7-membered ring. A sulfonamido group is optionally substituted by one or more of the substituents described for alkyl, cycloalkyl, aryl, heteroaryl, respectively.

[0813] “Sulfoxyl” refers to a —S(═O)₂OH radical.

[0814] “Sulfonate” refers to a —S(═O)₂—OR radical, where R is selected from the group consisting of alkyl, cycloalkyl, aryl, heteroaryl (bonded through a ring carbon) and heteroalicyclic (bonded through a ring carbon). A sulfonate group is optionally substituted on R by one or more of the substituents described for alkyl, cycloalkyl, aryl, heteroaryl, respectively.

[0815] Compounds of the invention also include crystalline and amorphous forms of those compounds, including, for example, polymorphs, pseudopolymorphs, solvates, hydrates, unsolvated polymorphs (including anhydrates), conformational polymorphs, and amorphous forms of the compounds, as well as mixtures thereof. “Crystalline form” and “polymorph” are intended to include all crystalline and amorphous forms of the compound, including, for example, polymorphs, pseudopolymorphs, solvates, hydrates, unsolvated polymorphs (including anhydrates), conformational polymorphs, and amorphous forms, as well as mixtures thereof, unless a particular crystalline or amorphous form is referred to.

[0816] Compounds of the invention also include antibodies. The terms “antibody” and its plural form “antibodies” refer to whole immunoglobulins and any antigen-binding fragment (“antigen-binding portion”) or single chains thereof. An “antibody” further refers to a glycoprotein comprising at least two heavy (H) chains and two light (L) chains inter-connected by disulfide bonds, or an antigen-binding portion thereof. Each heavy chain is comprised of a heavy chain variable region (abbreviated herein as V_{H}) and a heavy chain constant region. The heavy chain constant region is comprised of three domains, CH1, CH2 and CH3. Each light chain is comprised of a light chain variable region (abbreviated herein as V_{L}) and a light chain constant region. The light chain constant region is comprised of one domain, C_{L}. The V_{H} and V_{L} regions of an antibody may be further subdivided into regions of hypervariability, which are referred to as complementarity determining regions (CDR) or hypervariable regions (HVR), and which can be interspersed with regions that are more conserved, termed framework regions (FR). Each V_{H} and V_{L} is composed of three CDRs and four FRs, arranged from amino-terminus to carboxy-terminus in the following order: FR1, CDR1, FR2, CDR2, FR3, CDR3, FR4. The variable regions of the heavy and light chains contain a binding domain that interacts with an antigen epitope or epitopes. The constant regions of the antibodies may mediate the binding of the immunoglobulin to host tissues or factors, including various cells of the immune system (e.g., effector cells) and the first component (Clq) of the classical complement system.

[0817] The terms “monoclonal antibody,” “mAb,” “monoclonal antibody composition,” or their plural forms refer to a preparation of antibody molecules of single molecular composition. A monoclonal antibody composition displays a single binding specificity and affinity for a particular epitope. Monoclonal antibodies specific to, e.g., GITR, CD20, PD-1, PD-L1, or PD-L2 can be made using knowledge and skill in the art of injecting test subjects with GITR, CD20, PD-1, PD-L1, or PD-L2 antigen and then isolating hybridomas expressing antibodies having the desired sequence or functional characteristics. DNA encoding the monoclonal antibodies is readily isolated and sequenced using conventional procedures (e.g., by using oligonucleotide probes that are capable of binding specifically to genes encoding the heavy and light chains of the monoclonal antibodies). The hybridoma cells serve as a preferred source of such DNA. Once isolated, the DNA may be placed into expression vectors, which are then transfected into host cells such as E. coli cells, simian COS cells, Chinese hamster ovary (CHO) cells, or myeloma cells that do not otherwise produce immunoglobulin protein, to obtain the synthesis of monoclonal antibodies in the recombinant host cells. Recombinant production of antibodies will be described in more detail below.

[0818] The terms “antigen-binding portion” or “antigen-binding fragment” of an antibody (or simply “antibody portion”), as used herein, refers to one or more fragments of an antibody that retain the ability to specifically bind to an antigen (e.g., PD-1, PD-L1, or PD-L2). It has been shown that the antigen-binding function of an antibody can be performed by fragments of a full-length antibody. Examples of binding fragments encompassed within the term “antigen-binding portion” of an antibody include (i) a Fab fragment, a monovalent fragment consisting of the V_{L}, V_{H}, C_{L} and CH1 domains; (ii) a F(ab′)2 fragment, a bivalent fragment comprising two Fab fragments linked by a disulfide bridge at the hinge region; (iii) a Fd fragment consisting of the V_{H} and CH1 domains; (iv) a Fv fragment consisting of the V_{L} and V_{H} domains of a single arm of an antibody, (v) a domain antibody (dAb) fragment (Ward, et al., Nature, 1989, 341, 544-546), which may consist of a V_{H} or a V_{L} domain; and (vi) an isolated complementarity determining region (CDR). Furthermore, although the two domains of the Fv fragment, V_{L} and V_{H}, are coded for by separate genes, they can be joined, using recombinant methods, by a synthetic linker that enables them to be made as a single protein chain in which the V_{L} and V_{H} regions pair to form monovalent molecules known as single chain Fv (scFv); see, e.g., Bird, et al., Science 1988, 242, 423-426; and Huston, et al., Proc. Natl. Acad. Sci. USA 1988, 85, 5879-5883). Such scFv antibodies are also intended to be encompassed within the terms “antigen-binding portion” or “antigen-binding fragment” of an antibody. These antibody fragments are obtained using conventional techniques known to those with skill in the art, and the fragments are screened for utility in the same manner as are intact antibodies.

[0819] The term “human antibody,” as used herein, is intended to include antibodies having variable regions in which both the framework and CDR regions are derived from human germline immunoglobulin sequences. Furthermore, if the antibody contains a constant region, the constant region also is derived from human germline immunoglobulin sequences. The human antibodies of the invention may include amino acid residues not encoded by human germline immunoglobulin sequences (e.g., mutations introduced by random or site-specific mutagenesis in vitro or by somatic mutation in vivo). The term “human antibody”, as used herein, is not intended to include antibodies in which CDR sequences derived from the germline of another mammalian species, such as a mouse, have been grafted onto human framework sequences.

[0820] The term “human monoclonal antibody” refers to antibodies displaying a single binding specificity which have variable regions in which both the framework and CDR regions are derived from human germline immunoglobulin sequences. In one embodiment, the human monoclonal antibodies are produced by a hybridoma which includes a B cell obtained from a transgenic nonhuman animal, e.g., a transgenic mouse, having a genome comprising a human heavy chain transgene and a light chain transgene fused to an immortalized cell.

[0821] The term “recombinant human antibody”, as used herein, includes all human antibodies that are prepared, expressed, created or isolated by recombinant means, such as (a) antibodies isolated from an animal (e.g., a mouse) that is transgenic or transchromosomal for human immunoglobulin genes or a hybridoma prepared therefrom (described further below), (b) antibodies isolated from a host cell transformed to express the human antibody, e.g., from a transfectoma, (c) antibodies isolated from a recombinant, combinatorial human antibody library, and (d) antibodies prepared, expressed, created or isolated by any other means that involve splicing of human immunoglobulin gene sequences to other DNA sequences. Such recombinant human antibodies have variable regions in which the framework and CDR regions are derived from human germline immunoglobulin sequences. In certain embodiments, however, such recombinant human antibodies can be subjected to in vitro mutagenesis (or, when an animal transgenic for human Ig sequences is used, in vivo somatic mutagenesis) and thus the amino acid sequences of the V_{H} and V_{L} regions of the recombinant antibodies are sequences that, while derived from and related to human germline V_{H} and V_{L} sequences, may not naturally exist within the human antibody germline repertoire in vivo.

[0822] As used herein, “isotype” refers to the antibody class (e.g., IgM or IgG1) that is encoded by the heavy chain constant region genes.

[0823] The phrases “an antibody recognizing an antigen” and “an antibody specific for an antigen” are used interchangeably herein with the term “an antibody which binds specifically to an antigen.”

[0824] The term “human antibody derivatives” refers to any modified form of the human antibody, e.g., a conjugate of the antibody and another active pharmaceutical ingredient or antibody. The terms “conjugate,” “antibody-drug conjugate”, “ADC,” or “immunoconjugate” refers to an antibody, or a fragment thereof, conjugated to a therapeutic moiety, such as a bacterial toxin, a cytotoxic drug or a radionuclide-containing toxin. Toxic moieties can be conjugated to antibodies of the invention using methods available in the art.

[0825] The terms “humanized antibody,” “humanized antibodies,” and “humanized” are intended to refer to antibodies in which CDR sequences derived from the germline of another mammalian species, such as a mouse, have been grafted onto human framework sequences. Additional framework region modifications may be made within the human framework sequences. Humanized forms of non-human (for example, murine) antibodies are chimeric antibodies that contain minimal sequence derived from non-human immunoglobulin. For the most part, humanized antibodies are human immunoglobulins (recipient antibody) in which residues from a hypervariable region of the recipient are replaced by residues from a 15 hypervariable region of a non-human species (donor antibody) such as mouse, rat, rabbit or nonhuman primate having the desired specificity, affinity, and capacity. In some instances, Fv framework region (FR) residues of the human immunoglobulin are replaced by corresponding non-human residues. Furthermore, humanized antibodies may comprise residues that are not found in the recipient antibody or in the donor antibody. These modifications are made to further refine antibody performance. In general, the humanized antibody will comprise substantially all of at least one, and typically two, variable domains, in which all or substantially all of the hypervariable loops correspond to those of a non-human immunoglobulin and all or substantially all of the FR regions are those of a human immunoglobulin sequence. The humanized antibody optionally also will comprise at least a portion of an immunoglobulin constant region (Fc), typically that of a human immunoglobulin. For further details, see Jones, et al., Nature 1986, 321, 522-525; Riechmann, et al., Nature 1988, 332, 323-329; and Presta, Curr. Op. Struct. Biol. 1992, 2, 593-596.

[0826] The term “chimeric antibody” is intended to refer to antibodies in which the variable region sequences are derived from one species and the constant region sequences are derived from another species, such as an antibody in which the variable region sequences are derived from a mouse antibody and the constant region sequences are derived from a human antibody.

[0827] A “diabody” is a small antibody fragment with two antigen-binding sites. The fragments comprises a heavy chain variable domain (V_{H}) connected to a light chain variable domain (V_{L}) in the same polypeptide chain (V_{H}-V_{L} or V_{L}-V_{H}). By using a linker that is too short to allow pairing between the two domains on the same chain, the domains are forced to pair with the complementary domains of another chain and create two antigen-binding sites. Diabodies are described more fully in, e.g., European Patent No. EP 404,097, International Patent Publication No. WO 93/11161; and Bolliger, et aL, Proc. Natl. Acad. Sci. USA 1993, 90, 6444-6448.

[0828] The term “glycosylation” refers to a modified derivative of an antibody. An aglycoslated antibody lacks glycosylation. Glycosylation can be altered to, for example, increase the affinity of the antibody for antigen. Such carbohydrate modifications can be accomplished by, for example, altering one or more sites of glycosylation within the antibody sequence. For example, one or more amino acid substitutions can be made that result in elimination of one or more variable region framework glycosylation sites to thereby eliminate glycosylation at that site. Aglycosylation may increase the affinity of the antibody for antigen, as described in U.S. Pat. Nos. 5,714,350 and 6,350,861. Additionally or alternatively, an antibody can be made that has an altered type of glycosylation, such as a hypofucosylated antibody having reduced amounts of fucosyl residues or an antibody having increased bisecting GlcNac structures. Such altered glycosylation patterns have been demonstrated to increase the ability of antibodies. Such carbohydrate modifications can be accomplished by, for example, expressing the antibody in a host cell with altered glycosylation machinery. Cells with altered glycosylation machinery have been described in the art and can be used as host cells in which to express recombinant antibodies of the invention to thereby produce an antibody with altered glycosylation. For example, the cell lines Ms704, Ms705, and Ms709 lack the fucosyltransferase gene, FUT8 (alpha (1,6) fucosyltransferase), such that antibodies expressed in the Ms704, Ms705, and Ms709 cell lines lack fucose on their carbohydrates. The Ms704, Ms705, and Ms709 FUT8−/− cell lines were created by the targeted disruption of the FUT8 gene in CHO/DG44 cells using two replacement vectors (see e.g. U.S. Patent Publication No. 2004/0110704 or Yamane-Ohnuki, et al., Biotechnol. Bioeng., 2004, 87, 614-622). As another example, European Patent No. EP 1,176,195 describes a cell line with a functionally disrupted FUT8 gene, which encodes a fucosyl transferase, such that antibodies expressed in such a cell line exhibit hypofucosylation by reducing or eliminating the alpha 1,6 bond-related enzyme, and also describes cell lines which have a low enzyme activity for adding fucose to the N-acetylglucosamine that binds to the Fc region of the antibody or does not have the enzyme activity, for example the rat myeloma cell line YB2/0 (ATCC CRL 1662). International Patent Publication WO 03/035835 describes a variant CHO cell line, Lec 13 cells, with reduced ability to attach fucose to Asn(297)-linked carbohydrates, also resulting in hypofucosylation of antibodies expressed in that host cell (see also Shields, et al., J. Biol. Chem. 2002, 277, 26733-26740. International Patent Publication WO 99/54342 describes cell lines engineered to express glycoprotein-modifying glycosyl transferases (e.g., beta(1,4)-N-acetylglucosaminyltransferase III (GnTIII)) such that antibodies expressed in the engineered cell lines exhibit increased bisecting GlcNac structures which results in increased ADCC activity of the antibodies (see also Umana, et al., Nat. Biotech. 1999, 17, 176-180). Alternatively, the fucose residues of the antibody may be cleaved off using a fucosidase enzyme. For example, the fucosidase alpha-L-fucosidase removes fucosyl residues from antibodies as described in Tarentino, et al., Biochem. 1975, 14, 5516-5523.

[0829] “Pegylation” refers to a modified antibody, or a fragment thereof, that typically is reacted with polyethylene glycol (PEG), such as a reactive ester or aldehyde derivative of PEG, under conditions in which one or more PEG groups become attached to the antibody or antibody fragment. Pegylation may, for example, increase the biological (e.g., serum) half life of the antibody. Preferably, the pegylation is carried out via an acylation reaction or an alkylation reaction with a reactive PEG molecule (or an analogous reactive water-soluble polymer). As used herein, the term “polyethylene glycol” is intended to encompass any of the forms of PEG that have been used to derivatize other proteins, such as mono (C₁-C₁₀) alkoxy- or aryloxy-polyethylene glycol or polyethylene glycol-maleimide. The antibody to be pegylated may be an aglycosylated antibody. Methods for pegylation are known in the art and can be applied to the antibodies of the invention, as described for example in European Patent Nos. EP 0154316 and EP 0401384.

[0830] The term “conservative amino acid substitutions” in means amino acid sequence modifications which do not abrogate the binding of the antibody to the antigen. Conservative amino acid substitutions include the substitution of an amino acid in one class by an amino acid of the same class, where a class is defined by common physicochemical amino acid side chain properties and high substitution frequencies in homologous proteins found in nature, as determined, for example, by a standard Dayhoff frequency exchange matrix or BLOSUM matrix. Six general classes of amino acid side chains have been categorized and include: Class I (Cys); Class II (Ser, Thr, Pro, Ala, Gly); Class III (Asn, Asp, Gln, Glu); Class IV (His, Arg, Lys); Class V (Ile, Leu, Val, Met); and Class VI (Phe, Tyr, Trp). For example, substitution of an Asp for another class III residue such as Asn, Gln, or Glu, is a conservative substitution. Thus, a predicted nonessential amino acid residue in an anti-GITR antibody is preferably replaced with another amino acid residue from the same class. Methods of identifying amino acid conservative substitutions which do not eliminate antigen binding are well-known in the art (see, e.g., Brummell, et al., Biochemistry 1993, 32, 1180-1187; Kobayashi, et aL, Protein Eng. 1999, 12, 879-884 (1999); and Burks, et al., Proc. Natl. Acad. Sci. USA 1997, 94, 412-417.

[0831] The terms “sequence identity,” “percent identity,” and “sequence percent identity” in the context of two or more nucleic acids or polypeptides, refer to two or more sequences or subsequences that are the same or have a specified percentage of nucleotides or amino acid residues that are the same, when compared and aligned (introducing gaps, if necessary) for maximum correspondence, not considering any conservative amino acid substitutions as part of the sequence identity. The percent identity can be measured using sequence comparison software or algorithms or by visual inspection. Various algorithms and software are known in the art that can be used to obtain alignments of amino acid or nucleotide sequences. Suitable programs to determine percent sequence identity include for example the BLAST suite of programs available from the U.S. Government's National Center for Biotechnology Information BLAST web site. Comparisons between two sequences can be carried using either the BLASTN or BLASTP algorithm. BLASTN is used to compare nucleic acid sequences, while BLASTP is used to compare amino acid sequences. ALIGN, ALIGN-2 (Genentech, South San Francisco, Calif.) or MegAlign, available from DNASTAR, are additional publicly available software programs that can be used to align sequences. One skilled in the art can determine appropriate parameters for maximal alignment by particular alignment software. In certain embodiments, the default parameters of the alignment software are used.

[0832] Certain embodiments of the present invention comprise a variant of an antibody, e.g., a GITR binding molecule that is an antibody, an anti-CD20 antibody, an anti-PD-1 antibody, an anti-PD-L1 antibody, and/or an anti-PD-L2 antibody. As used herein, the term “variant” encompasses but is not limited to antibodies which comprise an amino acid sequence which differs from the amino acid sequence of a reference antibody by way of one or more substitutions, deletions and/or additions at certain positions within or adjacent to the amino acid sequence of the reference antibody. The variant may comprise one or more conservative substitutions in its amino acid sequence as compared to the amino acid sequence of a reference antibody. Conservative substitutions may involve, e.g., the substitution of similarly charged or uncharged amino acids. The variant retains the ability to specifically bind to the antigen of the reference antibody.

[0833] The term “radioisotope-labeled complex” refers to both non-covalent and covalent attachment of a radioactive isotope, such as ⁹⁰Y, ¹¹¹In, or ¹³¹I, to an antibody, including conjugates.

[0834] The term “biosimilar” means a biological product that is highly similar to a U.S. licensed reference biological product notwithstanding minor differences in clinically inactive components, and for which there are no clinically meaningful differences between the biological product and the reference product in terms of the safety, purity, and potency of the product. Furthermore, a similar biological or “biosimilar” medicine is a biological medicine that is similar to another biological medicine that has already been authorized for use by the European Medicines Agency. The term “biosimilar” is also used synonymously by other national and regional regulatory agencies. Biological products or biological medicines are medicines that are made by or derived from a biological source, such as a bacterium or yeast. They can consist of relatively small molecules such as human insulin or erythropoietin, or complex molecules such as monoclonal antibodies. For example, if the reference anti-CD20 monoclonal antibody is rituximab, an anti-CD20 biosimilar monoclonal antibody approved by drug regulatory authorities with reference to rituximab is a “biosimilar to” rituximab or is a “biosimilar thereof” of rituximab. In Europe, a similar biological or “biosimilar” medicine is a biological medicine that is similar to another biological medicine that has already been authorized for use by the European Medicines Agency (EMA). The relevant legal basis for similar biological applications in Europe is Article 6 of Regulation (EC) No 726/2004 and Article 10(4) of Directive 2001/83/EC, as amended and therefore in Europe, the biosimilar may be authorised, approved for authorisation or subject of an application for authorisation under Article 6 of Regulation (EC) No 726/2004 and Article 10(4) of Directive 2001/83/EC. The already authorized original biological medicinal product may be referred to as a “reference medicinal product” in Europe. Some of the requirements for a product to be considered a biosimilar are outlined in the CHIMP Guideline on Similar Biological Medicinal Products. In addition, product specific guidelines, including guidelines relating to monoclonal antibody biosimilars, are provided on a product-by-product basis by the EMA and published on its website. A biosimilar as described herein may be similar to the reference medicinal product by way of quality characteristics, biological activity, mechanism of action, safety profiles and/or efficacy. In addition, the biosimilar may be used or be intended for use to treat the same conditions as the reference medicinal product. Thus, a biosimilar as described herein may be deemed to have similar or highly similar quality characteristics to a reference medicinal product. Alternatively, or in addition, a biosimilar as described herein may be deemed to have similar or highly similar biological activity to a reference medicinal product. Alternatively, or in addition, a biosimilar as described herein may be deemed to have a similar or highly similar safety profile to a reference medicinal product. Alternatively, or in addition, a biosimilar as described herein may be deemed to have similar or highly similar efficacy to a reference medicinal product. As described herein, a biosimilar in Europe is compared to a reference medicinal product which has been authorised by the EMA. However, in some instances, the biosimilar may be compared to a biological medicinal product which has been authorised outside the European Economic Area (a non-EEA authorised “comparator”) in certain studies. Such studies include for example certain clinical and in vivo non-clinical studies. As used herein, the term “biosimilar” also relates to a biological medicinal product which has been or may be compared to a non-EEA authorised comparator. Certain biosimilars are proteins such as antibodies, antibody fragments (for example, antigen binding portions) and fusion proteins. A protein biosimilar may have an amino acid sequence that has minor modifications in the amino acid structure (including for example deletions, additions, and/or substitutions of amino acids) which do not significantly affect the function of the polypeptide. The biosimilar may comprise an amino acid sequence having a sequence identity of 97% or greater to the amino acid sequence of its reference medicinal product, e.g., 97%, 98%, 99% or 100%. The biosimilar may comprise one or more post-translational modifications, for example, although not limited to, glycosylation, oxidation, deamidation, and/or truncation which is/are different to the post-translational modifications of the reference medicinal product, provided that the differences do not result in a change in safety and/or efficacy of the medicinal product. The biosimilar may have an identical or different glycosylation pattern to the reference medicinal product. Particularly, although not exclusively, the biosimilar may have a different glycosylation pattern if the differences address or are intended to address safety concerns associated with the reference medicinal product. Additionally, the biosimilar may deviate from the reference medicinal product in for example its strength, pharmaceutical form, formulation, excipients and/or presentation, providing safety and efficacy of the medicinal product is not compromised. The biosimilar may comprise differences in for example pharmacokinetic (PK) and/or pharmacodynamic (PD) profiles as compared to the reference medicinal product but is still deemed sufficiently similar to the reference medicinal product as to be authorised or considered suitable for authorisation. In certain circumstances, the biosimilar exhibits different binding characteristics as compared to the reference medicinal product, wherein the different binding characteristics are considered by a Regulatory Authority such as the EMA not to be a barrier for authorisation as a similar biological product. The term “biosimilar” is also used synonymously by other national and regional regulatory agencies.

[0835] The term “GITR binding molecule” as used herein includes molecules that contain at least one antigen binding site that specifically binds to GITR. By “specifically binds” it is meant that the binding molecules exhibit essentially background binding to non-GITR molecules. An isolated binding molecule that specifically binds GITR may, however, have cross-reactivity to GITR molecules from other species. Anti-GITR antibodies and proteins may specifically bind to GITR, e.g., human GITR (hGITR), on T cells and dendritic cells.

[0836] The term “hematological malignancy” refers to mammalian cancers and tumors of the hematopoietic and lymphoid tissues, including but not limited to tissues of the blood, bone marrow, lymph nodes, and lymphatic system. Hematological malignancies are also referred to as “liquid tumors.” Hematological malignancies include, but are not limited to, ALL, CLL, SLL, acute myelogenous leukemia (AML), chronic myelogenous leukemia (CIVIL), acute monocytic leukemia (AMoL), Hodgkin's lymphoma, and non-Hodgkin's lymphomas. The term “B cell hematological malignancy” refers to hematological malignancies that affect B cells.

[0837] The term “solid tumor” refers to an abnormal mass of tissue that usually does not contain cysts or liquid areas. Solid tumors may be benign or malignant. The term “solid tumor cancer” refers to malignant, neoplastic, or cancerous solid tumors. Solid tumor cancers include, but are not limited to, sarcomas, carcinomas, and lymphomas, such as cancers of the lung, breast, prostate, colon, rectum, and bladder. The tissue structure of solid tumors includes interdependent tissue compartments including the parenchyma (cancer cells) and the supporting stromal cells in which the cancer cells are dispersed and which may provide a supporting microenvironment.

[0838] The term “microenvironment,” as used herein, may refer to the tumor microenvironment as a whole or to an individual subset of cells within the microenvironment.

[0839] For the avoidance of doubt, it is intended herein that particular features (for example integers, characteristics, values, uses, diseases, formulae, compounds or groups) described in conjunction with a particular aspect, embodiment or example of the invention are to be understood as applicable to any other aspect, embodiment or example described herein unless incompatible therewith. Thus such features may be used where appropriate in conjunction with any of the definition, claims or embodiments defined herein. All of the features disclosed in this specification (including any accompanying claims, abstract and drawings), and/or all of the steps of any method or process so disclosed, may be combined in any combination, except combinations where at least some of the features and/or steps are mutually exclusive. The invention is not restricted to any details of any disclosed embodiments. The invention extends to any novel one, or novel combination, of the features disclosed in this specification (including any accompanying claims, abstract and drawings), or to any novel one, or any novel combination, of the steps of any method or process so disclosed.

### Co-Administration of Compounds

[0840] In an embodiment, the invention includes a composition, such as a pharmaceutical composition, comprising a combination of a BTK inhibitor and a molecule selected from the group consisting of a GITR binding molecule, a 4-1BB agonist, an OX40 agonist, and combinations thereof. Preferably, said composition comprises a combination of a BTK inhibitor and an antibody, or an antigen binding portion thereof that binds to human GITR or 4-1BB or OX40.

[0841] In an embodiment, the invention includes a combination of a BTK inhibitor and a molecule selected from the group consisting of a GITR binding molecule, a 4-1BB agonist, an OX40 agonist, and combinations thereof. In some embodiments, each of BTK inhibitor, GITR binding molecule, 4-1BB agonist, and OX40 agonist is comprised within a separate composition, preferably a pharmaceutical composition.

[0842] In an embodiment, the invention includes a molecule selected from the group consisting of a GITR binding molecule, a 4-1BB agonist, an OX40 agonist, and combinations thereof for use in treating a disease or condition in a subject, in particular a hyperproliferative disorder such as leukemia, lymphoma, or a solid tumor cancer in a subject, wherein the molecule selected from the group consisting of a GITR binding molecule, a 4-1BB agonist, an OX40 agonist, and combinations thereof is for co-administration with a BTK inhibitor.

[0843] In an embodiment, the invention includes a BTK inhibitor for use in treating a disease or condition in a subject, in particular a hyperproliferative disorder such as leukemia, lymphoma or a solid tumor cancer in a subject, wherein the BTK inhibitor is for co-administration with a molecule selected from the group consisting of a GITR binding molecule, a 4-1BB Agonist, an OX40 agonist, and combinations thereof.

[0844] In some embodiments, the BTK inhibitor and an antibody selected from the group consisting of a GITR binding antibody, a 4-1BB binding antibody, an OX40 binding antibody, and combinations thereof is additionally for co-administration with an anti-CD20 antibody.

[0845] In some embodiments, the BTK inhibitor and an antibody selected from the group consisting of a GITR binding antibody, a 4-1BB binding antibody, an OX40 binding antibody, and combinations thereof is additionally for co-administration with a PD-1 or PD-L1 inhibitor.

[0846] Another aspect of the invention is a kit containing a BTK inhibitor and a molecule selected from the group consisting of a GITR binding molecule, a 4-1BB agonist, an OX40 agonist, and combinations thereof, wherein each of the molecule is formulated into a separate pharmaceutical composition, and wherein said separate pharmaceutical compositions are formulated for co-administration. Preferably, said kit contains a BTK inhibitor and a molecule selected from the group consisting of a GITR binding molecule, a 4-1BB agonist, an OX40 agonist, and combinations thereof.

[0847] Another aspect of the invention is a method of treating a disease or condition in a subject, in particular a hyperproliferative disorder such as leukemia, lymphoma or a solid tumor cancer in a subject, comprising co-administering to the subject in need thereof a therapeutically effective amount of a combination of a BTK inhibitor and a molecule selected from the group consisting of a GITR binding molecule, a 4-1BB agonist, an OX40 agonist, and combinations thereof. In an embodiment, the foregoing method exhibits synergistic effects that may result in greater efficacy, less side effects, the use of less active pharmaceutical ingredient to achieve a given clinical result, or other synergistic effects. A combination of a BTK inhibitor and a molecule selected from the group consisting of a GITR binding molecule, a 4-1BB agonist, an OX40 agonist, and combinations thereof is a preferred embodiment. The pharmaceutical composition comprising the combination, and the kit, are both for use in treating such disease or condition.

[0848] In a preferred embodiment, the solid tumor cancer is selected from the group consisting of breast, lung, colorectal, thyroid, bone sarcoma, pancreatic, and stomach cancers.

[0849] In a preferred embodiment, the leukemia is selected from the group consisting of acute myelogenous leukemia (AML), chronic myelogenous leukemia (CIVIL), acute lymphoblastic leukemia (ALL), B cell chronic lymphocytic leukemia (B-CLL), and chronic lymphoid leukemia (CLL).

[0850] In a preferred embodiment, the lymphoma is selected from the group consisting of Burkitt's lymphoma, mantle cell lymphoma, follicular lymphoma, indolent B-cell non-Hodgkin's lymphoma, histiocytic lymphoma, activated B-cell like diffuse large B cell lymphoma (DLBCL-ABC), germinal center B-cell like diffuse large B cell lymphoma (DLBCL-GCB), and diffuse large B cell lymphoma (DLBCL).

[0851] In an embodiment, the combination of the BTK inhibitor and a molecule selected from the group consisting of a GITR binding molecule, a 4-1BB agonist, an OX40 agonist, and combinations thereof is administered by oral, intravenous, intramuscular, intraperitoneal, subcutaneous, or transdermal means.

[0852] In an embodiment, the BTK inhibitor is in the form of a pharmaceutically acceptable salt, solvate, hydrate, complex, derivative, prodrug (such as an ester or phosphate ester), or cocrystal.

[0853] In an embodiment, the molecule selected from the group consisting of a GITR binding molecule, a 4-1BB agonist, an OX40 agonist, and combinations thereof is in the form of a fragment, derivative, conjugate, variant, radioisotope-labeled complex, or biosimilar thereof.

[0854] In an embodiment, the molecule selected from the group consisting of a GITR binding molecule, a 4-1BB agonist, an OX40 agonist, and combinations thereof is administered to the subject before administration of the BTK inhibitor.

[0855] In an embodiment, the molecule selected from the group consisting of a GITR binding molecule, a 4-1BB agonist, an OX40 agonist, and combinations thereof is administered concurrently with the administration of the BTK inhibitor.

[0856] In an embodiment, the molecule selected from the group consisting of a GITR binding molecule, a 4-1BB agonist, an OX40 agonist, and combinations thereof is administered to the subject after administration of the BTK inhibitor.

[0857] In a preferred embodiment, the subject is a mammal, such as a human. In an embodiment, the subject is a human. In an embodiment, the subject is a companion animal. In an embodiment, the subject is a canine, feline, or equine.

[0858] In a preferred embodiment, the molecule selected from the group consisting of a GITR binding molecule, a 4-1BB agonist, an OX40 agonist, and combinations thereof is a biosimilar molecule. In an embodiment, the biosimilar is a GITR binding molecule, a 4-1BB agonist, an OX40 agonist or variant or fragment thereof which is authorised or submitted for authorisation, which authorisation is based on an approved GITR binding molecule or an approved 4-1BB agonist, or an approved OX40 agonist as a reference medicinal product or reference biological product. The terms reference medicinal product and reference biological product are used as defined herein.

[0859] In an embodiment, the invention includes a combination of a BTK inhibitor and a molecule selected from the group consisting of a GITR binding molecule, a 4-1BB agonist, an OX40 agonist, and combinations thereof. In an embodiment, the invention is a combination of a BTK inhibitor and a molecule selected from the group consisting of a GITR binding molecule, a 4-1BB agonist, an OX40 agonist, and combinations thereof. In a preferred embodiment, the combination is for use in treating a disease or condition in a subject, in particular a hyperproliferative disorder such as leukemia, lymphoma, or a solid tumor cancer in a subject. In a preferred embodiment, the combination is for co-administration to the subject in need thereof. In an embodiment, the foregoing combinations exhibit synergistic effects that may result in greater efficacy, less side effects, the use of less active pharmaceutical ingredient to achieve a given clinical result, or other synergistic effects.

### BTK Inhibitors

[0860] The BTK inhibitor may be any BTK inhibitor known in the art. In particular, it is one of the BTK inhibitors described in more detail in the following paragraphs.

[0861] In an embodiment, the BTK inhibitor is a compound of Formula (1):

[chemical structure]

or a pharmaceutically acceptable salt, solvate, hydrate, cocrystal, or prodrug thereof, wherein:
[0862] X is CH, N, O or S;
[0863] Y is C(R₆), N, O or S;
[0864] Z is CH, N or bond;
[0865] A is CH or N;
[0866] B₁ is N or C(R₇);
[0867] B₂ is N or C(R₈);
[0868] B₃ is N or C(R₉);
[0869] B₄ is N or C(R₁₀);
[0870] R₁ is R₁₁C(═O), R₁₂S(═O), R₁₃S(═O)₂ or (C₁₋₆)alkyl optionally substituted with R₁₄;
[0871] R₂ is H, (C₁₋₃)alkyl or (C₃₋₇)cycloalkyl;
[0872] R₃ is H, (C₁₋₆)alkyl or (C₃₋₇)cycloalkyl); or
[0873] R₂ and R₃ form, together with the N and C atom they are attached to, a (C₃₋₇)heterocycloalkyl optionally substituted with one or more fluorine, hydroxyl, (C₁₋₃)alkyl, (C₁₋₃)alkoxy or oxo;
[0874] R₄ is H or (C₁₋₃)alkyl;
[0875] R₅ is H, halogen, cyano, (C₁₋₄)alkyl, (C₁₋₃)alkoxy, (C₃₋₆)cycloalkyl, any alkyl group of which is optionally substituted with one or more halogen; or R₅ is (C₆₋₁₀)aryl or (C₂₋₆)heterocycloalkyl;
[0876] R₆ is H or (C₁₋₃)alkyl; or
[0877] R₅ and R₆ together may form a (C₃₋₇)cycloalkenyl or (C₂₋₆)heterocycloalkenyl, each optionally substituted with (C₁₋₃)alkyl or one or more halogens;
[0878] R₇ is H, halogen, CF₃, (C₁₋₃)alkyl or (C₁₋₃)alkoxy;
[0879] R₈ is H, halogen, CF₃, (C₁₋₃)alkyl or (C₁₋₃)alkoxy; or
[0880] R₇ and R₈ together with the carbon atoms they are attached to, form (C₆₋₁₀)aryl or (C₁₋₉)heteroaryl;
[0881] R₉ is H, halogen, (C₁₋₃)alkyl or (C₁₋₃)alkoxy;
[0882] R₁₀ is H, halogen, (C₁₋₃)alkyl or (C₁₋₃)alkoxy;
[0883] R₁₁ is independently selected from the group consisting of (C₁₋₆)alkyl, (C₂₋₆)alkenyl and (C₂₋₆)alkynyl, where each alkyl, alkenyl or alkynyl is optionally substituted with one or more substituents selected from the group consisting of hydroxyl, (C₁₋₄)alkyl, (C₃₋₇)cycloalkyl, [(C₁₋₄)alkyl]amino, di[(C₁₋₄)alkyl]amino, (C₁₋₃)alkoxy, (C₃₋₇)cycloalkoxy, (C₆₋₁₀)aryl and (C₃₋₇)heterocycloalkyl; or R₁₁ is (C₁₋₃)alkyl-C(O)—S—(C₁₋₃)alkyl; or
[0884] R₁₁ is (C₁₋₅)heteroaryl optionally substituted with one or more substituents selected from the group consisting of halogen or cyano;
[0885] R₁₂ and R₁₃ are independently selected from the group consisting of (C₂₋₆)alkenyl or (C₂₋₆)alkynyl, both optionally substituted with one or more substituents selected from the group consisting of hydroxyl, (C₁₋₄)alkyl, (C₃₋₇)cycloalkyl, [(C₁₋₄)alkyl]amino, di[(C₁₋₄)alkyl]amino, (C₁₋₃)alkoxy, (C₃₋₇)cycloalkoxy, (C₆₋₁₀)aryl and (C₃₋₇)heterocycloalkyl; or a (C₁₋₅)heteroaryl optionally substituted with one or more substituents selected from the group consisting of halogen and cyano; and
[0886] R₁₄ is independently selected from the group consisting of halogen, cyano, (C₂₋₆)alkenyl and (C₂₋₆)alkynyl, both optionally substituted with one or more substituents selected from the group consisting of hydroxyl, (C₁₋₄)alkyl, (C₃₋₇)cycloalkyl, [(C₁₋₄)alkyl]amino, di[(C₁₋₄)alkyl]amino, (C₁₋₃)alkoxy, (C₃₋₇)cycloalkoxy, (C₆₋₁₀)aryl, (C₁₋₅)heteroaryl and (C₃₋₇)heterocycloalkyl;
[0887] with the proviso that:
[0888] 0 to 2 atoms of X, Y, Z can simultaneously be a heteroatom;
[0889] when one atom selected from X, Y is O or S, then Z is a bond and the other atom selected from X, Y can not be O or S;
[0890] when Z is C or N then Y is C(R₆) or N and X is C or N;
[0891] 0 to 2 atoms of B₁, B₂, B₃ and B₄ are N;
[0892] with the terms used having the following meanings:
[0893] (C₁₋₃)alkyl means a branched or unbranched alkyl group having 1-3 carbon atoms, being methyl, ethyl, propyl or isopropyl;
[0894] (C₁₋₄)alkyl means a branched or unbranched alkyl group having 1-4 carbon atoms, being methyl, ethyl, propyl, isopropyl, butyl, isobutyl, sec-butyl and tert-butyl, (C₁₋₃)alkyl groups being preferred;
[0895] (C₁₋₂)alkoxy means an alkoxy group having 1-2 carbon atoms, the alkyl moiety having the same meaning as previously defined;
[0896] (C₁₋₃)alkoxy means an alkoxy group having 1-3 carbon atoms, the alkyl moiety having the same meaning as previously defined. (C₁₋₂)alkoxy groups are preferred;
[0897] (C₂₋₆)alkenyl means a branched or unbranched alkenyl group having 2-6 carbon atoms, such as ethenyl, 2-butenyl, and n-pentenyl, (C₂₋₄)alkenyl groups being most preferred;
[0898] (C₂₋₆)alkynyl means a branched or unbranched alkynyl group having 2-6 carbon atoms, such as ethynyl, propynyl, n-butynyl, n-pentynyl, isopentynyl, isohexynyl or n-hexynyl. (C₂₋₄)alkynyl groups are preferred; (C₃₋₄)cycloalkyl means a cycloalkyl group having 3-6 carbon atoms, being cyclopropyl, cyclobutyl, cyclopentyl or cyclohexyl;
[0899] (C₃₋₇)cycloalkyl means a cycloalkyl group having 3-7 carbon atoms, being cyclopropyl, cyclobutyl, cyclopentyl, cyclohexyl or cycloheptyl;
[0900] (C₂₋₆)heterocycloalkyl means a heterocycloalkyl group having 2-6 carbon atoms, preferably 3-5 carbon atoms, and one or two heteroatoms selected from N, O and/or S, which may be attached via a heteroatom if feasible, or a carbon atom; preferred heteroatoms are N or O; also preferred are piperidine, morpholine, pyrrolidine and piperazine; with the most preferred (C₂₋₆)heterocycloalkyl being pyrrolidine; the heterocycloalkyl group may be attached via a heteroatom if feasible;
[0901] (C₃₋₇)heterocycloalkyl means a heterocycloalkyl group having 3-7 carbon atoms, preferably 3-5 carbon atoms, and one or two heteroatoms selected from N, O and/or S. Preferred heteroatoms are N or O; preferred (C₃₋₇) heterocycloalkyl groups are azetidinyl, pyrrolidinyl, piperidinyl, homopiperidinyl or morpholinyl; more preferred (C₃₋₇)heterocycloalkyl groups are piperidine, morpholine and pyrrolidine; and the heterocycloalkyl group may be attached via a heteroatom if feasible;
[0902] (C₃₋₇)cycloalkoxy means a cycloalkyl group having 3-7 carbon atoms, with the same meaning as previously defined, attached via a ring carbon atom to an exocyclic oxygen atom;
[0903] (C₆₋₁₀)aryl means an aromatic hydrocarbon group having 6-10 carbon atoms, such as phenyl, naphthyl, tetrahydronaphthyl or indenyl; the preferred (C₆₋₁₀)aryl group is phenyl;
[0904] (C₁₋₅)heteroaryl means a substituted or unsubstituted aromatic group having 1-5 carbon atoms and 1-4 heteroatoms selected from N, O and/or S; the (C₁₋₅)heteroaryl may optionally be substituted; preferred (C₁₋₅)heteroaryl groups are tetrazolyl, imidazolyl, thiadiazolyl, pyridyl, pyrimidyl, triazinyl, thienyl or furyl, a more preferred (C₁₋₅)heteroaryl is pyrimidyl;
[0905] [(C₁₋₄)alkyl]amino means an amino group, monosubstituted with an alkyl group containing 1-4 carbon atoms having the same meaning as previously defined; preferred [(C₁₋₄)alkyl]amino group is methylamino;
[0906] di[(C₁₋₄)alkyl]amino means an amino group, disubstituted with alkyl group(s), each containing 1-4 carbon atoms and having the same meaning as previously defined; preferred di[(C₁₋₄)alkyl]amino group is dimethylamino;
[0907] halogen means fluorine, chlorine, bromine or iodine;
[0908] (C₁₋₃)alkyl-C(O)—S—(C₁₋₃)alkyl means an alkyl-carbonyl-thio-alkyl group, each of the alkyl groups having 1 to 3 carbon atoms with the same meaning as previously defined;
[0909] (C₃₋₇)cycloalkenyl means a cycloalkenyl group having 3-7 carbon atoms, preferably 5-7 carbon atoms; preferred (C₃₋₇)cycloalkenyl groups are cyclopentenyl or cyclohexenyl; cyclohexenyl groups are most preferred;
[0910] (C₂₋₆)heterocycloalkenyl means a heterocycloalkenyl group having 2-6 carbon atoms, preferably 3-5 carbon atoms; and 1 heteroatom selected from N, O and/or S; preferred (C₂₋₆)heterocycloalkenyl groups are oxycyclohexenyl and azacyclohexenyl group.
[0911] In the above definitions with multifunctional groups, the attachment point is at the last group.
[0912] When, in the definition of a substituent, it is indicated that “all of the alkyl groups” of said substituent are optionally substituted, this also includes the alkyl moiety of an alkoxy group.
[0913] A circle in a ring of Formula (1) indicates that the ring is aromatic.
[0914] Depending on the ring formed, the nitrogen, if present in X or Y, may carry a hydrogen.

[0915] In a preferred embodiment, the BTK inhibitor is a compound of Formula (1) or a pharmaceutically acceptable salt thereof, wherein:
[0916] X is CH or S;
[0917] Y is C(R₆);
[0918] Z is CH or bond;
[0919] A is CH;
[0920] B₁ is N or C(R₇);
[0921] B₂ is N or C(R₈);
[0922] B₃ is N or CH;
[0923] B₄ is N or CH;
[0924] R₁ is R₁₁C(═O),
[0925] R₂ is (C₁₋₃)alkyl;
[0926] R₃ is (C₁₋₃)alkyl; or
[0927] R₂ and R₃ form, together with the N and C atom they are attached to, a (C₃₋₇)heterocycloalkyl ring selected from the group consisting of azetidinyl, pyrrolidinyl, piperidinyl, and morpholinyl, optionally substituted with one or more fluorine, hydroxyl, (C₁₋₃)alkyl, or (C₁₋₃)alkoxy;
[0928] R₄ is H;
[0929] R₅ is H, halogen, cyano, (C₁₋₄)alkyl, (C₁₋₃)alkoxy, (C₃₋₆)cycloalkyl, or an alkyl group which is optionally substituted with one or more halogen;
[0930] R₆ is H or (C₁₋₃)alkyl;
[0931] R₇ is H, halogen or (C₁₋₃)alkoxy;
[0932] R₈ is H or (C₁₋₃)alkyl; or
[0933] R₇ and R₈ form, together with the carbon atom they are attached to a (C₆₋₁₀)aryl or (C₁₋₉)heteroaryl;
[0934] R₅ and R₆ together may form a (C₃₋₇)cycloalkenyl or (C₂₋₆)heterocycloalkenyl, each optionally substituted with (C₁₋₃)alkyl or one or more halogen;
[0935] R₁₁ is independently selected from the group consisting of (C₂₋₆)alkenyl and (C₂₋₆)alkynyl, where each alkenyl or alkynyl is optionally substituted with one or more substituents selected from the group consisting of hydroxyl, (C₁₋₄)alkyl, (C₃₋₇)cycloalkyl, [(C₁₋₄)alkyl]amino, di[(C₁₋₄)alkyl]amino, (C₁₋₃)alkoxy, (C₃₋₇)cycloalkoxy, (C₆₋₁₀)aryl and (C₃₋₇)heterocycloalkyl;
[0936] with the proviso that 0 to 2 atoms of B₁, B₂, B₃ and B₄ are N.

[0937] In an embodiment of Formula (1), B₁ is C(R₇); B₂ is C(R₈); B₃ is C(R₉); B₄ is C(R₁₀); R₇, R₉, and R₁₀ are each H; and R is hydrogen or methyl.

[0938] In an embodiment of Formula (1), the ring containing X, Y and Z is selected from the group consisting of pyridyl, pyrimidyl, pyridazyl, triazinyl, thiazolyl, oxazolyl and isoxazolyl.

[0939] In an embodiment of Formula (1), the ring containing X, Y and Z is selected from the group consisting of pyridyl, pyrimidyl and pyridazyl.

[0940] In an embodiment of Formula (1), the ring containing X, Y and Z is selected from the group consisting of pyridyl and pyrimidyl.

[0941] In an embodiment of Formula (1), the ring containing X, Y and Z is pyridyl.

[0942] In an embodiment of Formula (1), R₅ is selected from the group consisting of hydrogen, fluorine, methyl, methoxy and trifluoromethyl.

[0943] In an embodiment of Formula (1), R₅ is hydrogen.

[0944] In an embodiment of Formula (1), R₂ and R₃ together form a heterocycloalkyl ring selected from the group consisting of azetidinyl, pyrrolidinyl, piperidinyl, homopiperidinyl and morpholinyl, optionally substituted with one or more of fluoro, hydroxyl, (C₁₋₃)alkyl and (C₁₋₃)alkoxy.

[0945] In an embodiment of Formula (1), R₂ and R₃ together form a heterocycloalkyl ring selected from the group consisting of azetidinyl, pyrrolidinyl and piperidinyl.

[0946] In an embodiment of Formula (1), R₂ and R₃ together form a pyrrolidinyl ring.

[0947] In an embodiment of Formula (1), R₁ is independently selected from the group consisting of (C₁₋₆)alkyl, (C₂₋₆)alkenyl or (C₂₋₆)alkynyl, each optionally substituted with one or more substituents selected from the group consisting of hydroxyl, (C₁₋₄)alkyl, (C₃₋₇)cycloalkyl, [(C₁₋₄)alkyl]amino, di[(C₁₋₄)alkyl] amino, (C₁₋₃)alkoxy, (C₃₋₇)cycloalkoxy, (C₆₋₁₀)aryl and (C₃₋₇)heterocycloalkyl.

[0948] In an embodiment of Formula (1), B₁, B₂, B₃ and B₄ are CH; X is N; Y and Z are CH; R₅ is CH₃; A is N; R₂, R₃ and R₄ are H; and R₁ is CO—CH₃.

[0949] In an embodiment of Formula (1), B₁, B₂, B₃ and B₄ are CH; X and Y are N; Z is CH; R₅ is CH₃; A is N; R₂, R₃ and R₄ are H; and R₁ is CO—CH₃.

[0950] In an embodiment of Formula (1), B₁, B₂, B₃ and B₄ are CH; X and Y are N; Z is CH; R₅ is CH₃; A is CH; R₂ and R₃ together form a piperidinyl ring; R₄ is H; and R₁ is CO-ethenyl.

[0951] In an embodiment of Formula (1), B₁, B₂, B₃ and B₄ are CH; X, Y and Z are CH; R₅ is H; A is CH; R₂ and R₃ together form a pyrrolidinyl ring; R₄ is H; and R₁ is CO-propynyl.

[0952] In an embodiment of Formula (1), B₁, B₂, B₃ and B₄ are CH; X, Y and Z are CH; R₅ is CH₃; A is CH; R₂ and R₃ together form a piperidinyl ring; R₄ is H; and R₁ is CO-propynyl.

[0953] In an embodiment of Formula (1), B₁, B₂, B₃ and B₄ are CH; X and Y are N; Z is CH; R₅ is H; A is CH; R₂ and R₃ together form a morpholinyl ring; R₄ is H; and R₁ is CO-ethenyl.

[0954] In an embodiment of Formula (1), B₁, B₂, B₃ and B₄ are CH; X and Y are N; Z is CH; R₅ is CH₃; A is CH; R₂ and R₃ together form a morpholinyl ring; R₄ is H; and R₁ is CO-propynyl.

[0955] In a preferred embodiment, the BTK inhibitor is a compound of Formula (2):

[chemical structure]

or a pharmaceutically acceptable salt, solvate, hydrate, cocrystal, or prodrug thereof. The preparation of this compound is described in International Patent Application Publication No. WO 2013/010868 and U.S. Patent Application Publication No. US 2014/0155385 A1, the disclosures of which are incorporated herein by reference.

[0956] In a preferred embodiment, the BTK inhibitor is (S)-4-(8-amino-3-(1-(but-2-ynoyl)pyrrolidin-2-yl)imidazo[1,5-a]pyrazin-1-yl)-N-(pyridin-2-yl)benzamide or pharmaceutically acceptable salt, solvate, hydrate, cocrystal, or prodrug thereof.

[0957] In a preferred embodiment, the BTK inhibitor is a compound of Formula (3):

[chemical structure]

or a pharmaceutically acceptable salt, solvate, hydrate, cocrystal, or prodrug thereof. The preparation of this compound is described in International Patent Application Publication No. WO 2013/010868 and U.S. Patent Application Publication No. US 2014/0155385 A1, the disclosures of which are incorporated herein by reference.

[0958] In a preferred embodiment, the BTK inhibitor is a compound of Formula (4):

[chemical structure]

or a pharmaceutically acceptable salt, solvate, hydrate, cocrystal, or prodrug thereof. The preparation of this compound is described in International Patent Application Publication No. WO 2013/010868 and U.S. Patent Application Publication No. US 2014/0155385 A1, the disclosures of which are incorporated herein by reference.

[0959] In a preferred embodiment, the BTK inhibitor is a compound of Formula (5):

[chemical structure]

or a pharmaceutically acceptable salt, solvate, hydrate, cocrystal, or prodrug thereof. The preparation of this compound is described in International Patent Application Publication No. WO 2013/010868 and U.S. Patent Application Publication No. US 2014/0155385 A1, the disclosures of which are incorporated herein by reference.

[0960] In a preferred embodiment, the BTK inhibitor is a compound of Formula (6):

[chemical structure]

or a pharmaceutically acceptable salt, solvate, hydrate, cocrystal, or prodrug thereof. The preparation of this compound is described in International Patent Application Publication No. WO 2013/010868 and U.S. Patent Application Publication No. US 2014/0155385 A1, the disclosures of which are incorporated herein by reference.

[0961] In a preferred embodiment, the BTK inhibitor is a compound of Formula (7):

[chemical structure]

or a pharmaceutically acceptable salt, solvate, hydrate, cocrystal, or prodrug thereof. The preparation of this compound is described in International Patent Application Publication No. WO 2013/010868 and U.S. Patent Application Publication No. US 2014/0155385 A1, the disclosures of which are incorporated herein by reference.

[0962] In other embodiments, the BTK inhibitors include, but are not limited to, those compounds described in International Patent Application Publication No. WO 2013/010868 and U.S. Patent Application Publication No. US 2014/0155385 A1, the disclosures of each of which are specifically incorporated by reference herein.

[0963] In an embodiment, the BTK inhibitor is a compound of Formula (8):

[chemical structure]

or a pharmaceutically acceptable salt, solvate, hydrate, cocrystal, or prodrug thereof, wherein:
[0964] X is CH, N, O or S;
[0965] Y is C(R₆), N, O or S;
[0966] Z is CH, N or bond;
[0967] A is CH or N;
[0968] B₁ is N or C(R₇);
[0969] B₂ is N or C(R₈);
[0970] B₃ is N or C(R₉);
[0971] B₄ is N or C(R₁₀);
[0972] R₁ is R₁₁C(O), R₁₂S(O), R₁₃SO₂ or (C₁₋₆)alkyl optionally substituted with R₁₄;
[0973] R₂ is H, (C₁₋₃)alkyl or (C₃₋₇)cycloalkyl;
[0974] R₃ is H, (C₁₋₆)alkyl or (C₃₋₇)cycloalkyl); or
[0975] R₂ and R₃ form, together with the N and C atom they are attached to, a (C₃₋₇)heterocycloalkyl optionally substituted with one or more fluorine, hydroxyl, (C₁₋₃)alkyl, (C₁₋₃)alkoxy or oxo;
[0976] R₄ is H or (C₁₋₃)alkyl;
[0977] R₅ is H, halogen, cyano, (C₁₋₄)alkyl, (C₁₋₃)alkoxy, (C₃₋₆)cycloalkyl; all alkyl groups of R5 are optionally substituted with one or more halogen; or R₅ is (C₆₋₁₀)aryl or (C₂₋₆)heterocycloalkyl;
[0978] R₆ is H or (C₁₋₃)alkyl; or R₅ and R₆ together may form a (C₃₋₇)cycloalkenyl, or (C₂₋₆)heterocycloalkenyl; each optionally substituted with (C₁₋₃)alkyl, or one or more halogen;
[0979] R₇ is H, halogen, CF₃, (C₁₋₃)alkyl or (C₁₋₃)alkoxy;
[0980] R₈ is H, halogen, CF₃, (C₁₋₃)alkyl or (C₁₋₃)alkoxy; or
[0981] R₇ and R together with the carbon atoms they are attached to, form (C₆₋₁₀)aryl or (C₁₋₅)heteroaryl;
[0982] R₉ is H, halogen, (C₁₋₃)alkyl or (C₁₋₃)alkoxy;
[0983] R₁₀ is H, halogen, (C₁₋₃)alkyl or (C₁₋₃)alkoxy;
[0984] R₁₁ is independently selected from a group consisting of (C₁₋₆)alkyl, (C₂₋₆)alkenyl and (C₂₋₆)alkynyl each alkyl, alkenyl or alkynyl optionally substituted with one or more groups selected from hydroxyl, (C₁₋₄)alkyl, (C₃₋₇)cycloalkyl, [(C₁₋₄)alkyl]amino, di[(C₁₋₄)alkyl]amino, (C₁₋₃)alkoxy, (C₃₋₇)cycloalkoxy, (C₆₋₁₀)aryl or (C₃₋₇)heterocycloalkyl, or
[0985] R₁₁ is (C₁₋₃)alkyl-C(O)—S—(C₁₋₃)alkyl; or
[0986] R₁₁ is (C₁₋₅)heteroaryl optionally substituted with one or more groups selected from halogen or cyano.

[0987] R₁₂ and R₁₃ are independently selected from a group consisting of (C₂₋₆)alkenyl or (C₂₋₆)alkynyl both optionally substituted with one or more groups selected from hydroxyl, (C₁₋₄)alkyl, (C₃₋₇)cycloalkyl, [(C₁₋₄)alkyl]amino, di[(C₁₋₄)alkyl]amino, (C₁₋₃)alkoxy, (C₃₋₇)cycloalkoxy, (C₆₋₁₀)aryl, or (C₃₋₇)heterocycloalkyl; or
[0988] (C₁₋₅)heteroaryl optionally substituted with one or more groups selected from halogen or cyano;
[0989] R₁₄ is independently selected from a group consisting of halogen, cyano or (C₂₋₆)alkenyl or (C₂₋₆)alkynyl both optionally substituted with one or more groups selected from hydroxyl, (C₁₋₄)alkyl, (C₃₋₇)cycloalkyl, [(C₁₋₄)alkyl]amino, di[(C₁₋₄)alkyl]amino, (C₁₋₃)alkoxy, (C₃₋₇)cycloalkoxy, (C₆₋₁₀)aryl, (C₁₋₅)heteroaryl or (C₃₋₇)heterocycloalkyl;
   with the proviso that
   [0990] 0 to 2 atoms of X, Y, Z can simultaneously be a heteroatom;
   [0991] when one atom selected from X, Y is O or S, then Z is a bond and the other atom selected from X, Y can not be O or S;
   [0992] when Z is C or N then Y is C(R₆) or N and X is C or N;
   [0993] 0 to 2 atoms of B₁, B₂, B₃ and B₄ are N;
[0994] with the terms used having the following meanings:
[0995] (C₁₋₃)alkyl means a branched or unbranched alkyl group having 1-3 carbon atoms, being methyl, ethyl, propyl or isopropyl;
[0996] (C₁₋₄)alkyl means a branched or unbranched alkyl group having 1-4 carbon atoms, being methyl, ethyl, propyl, isopropyl, butyl, isobutyl, sec-butyl and tert-butyl, (C₁₋₃)alkyl groups being preferred;
[0997] (C₁₋₆)alkyl means a branched or unbranched alkyl group having 1-6 carbon atoms, for example methyl, ethyl, propyl, isopropyl, butyl, tert-butyl, n-pentyl and n-hexyl. (C₁₋₅)alkyl groups are preferred, (C₁₋₄)alkyl being most preferred;
[0998] (C₁₋₂)alkoxy means an alkoxy group having 1-2 carbon atoms, the alkyl moiety having the same meaning as previously defined;
[0999] (C₁₋₃)alkoxy means an alkoxy group having 1-3 carbon atoms, the alkyl moiety having the same meaning as previously defined, with (C₁₋₂)alkoxy groups preferred;
[1000] (C₂₋₄)alkenyl means a branched or unbranched alkenyl group having 2-4 carbon atoms, such as ethenyl, 2-propenyl, isobutenyl or 2-butenyl;
[1001] (C₂₋₆)alkenyl means a branched or unbranched alkenyl group having 2-6 carbon atoms, such as ethenyl, 2-butenyl, and n-pentenyl, with (C₂₋₄)alkenyl groups preferred, and (C₂₋₃)alkenyl groups even more preferred;
[1002] (C₂₋₄)alkynyl means a branched or unbranched alkynyl group having 2-4 carbon atoms, such as ethynyl, 2-propynyl or 2-butynyl;
[1003] (C₂₋₆)alkynyl means a branched or unbranched alkynyl group having 2-6 carbon atoms, such as ethynyl, propynyl, n-butynyl, n-pentynyl, isopentynyl, isohexynyl or n-hexynyl, with (C₂₋₄)alkynyl groups preferred, and (C₂₋₃)alkynyl groups more preferred;
[1004] (C₃₋₇)cycloalkyl means a cycloalkyl group having 3-7 carbon atoms, being cyclopropyl, cyclobutyl, cyclopentyl, cyclohexyl or cycloheptyl;
[1005] (C₂₋₆)heterocycloalkyl means a heterocycloalkyl group having 2-6 carbon atoms, preferably 3-5 carbon atoms, and one or two heteroatoms selected from N, O and/or S, which may be attached via a heteroatom if feasible, or a carbon atom; preferred heteroatoms are N or O; preferred groups are piperidine, morpholine, pyrrolidine and piperazine; a most preferred (C₂₋₆)heterocycloalkyl is pyrrolidine; and the heterocycloalkyl group may be attached via a heteroatom if feasible;
[1006] (C₃₋₇)heterocycloalkyl means a heterocycloalkyl group having 3-7 carbon atoms, preferably 3-5 carbon atoms, and one or two heteroatoms selected from N, O and/or S; preferred heteroatoms are N or O; preferred (C₃₋₇) heterocycloalkyl groups are azetidinyl, pyrrolidinyl, piperidinyl, homopiperidinyl or morpholinyl; more preferred (C₃₋₇)heterocycloalkyl groups are piperidine, morpholine and pyrrolidine; even more preferred are piperidine and pyrrolodine; and the heterocycloalkyl group may be attached via a heteroatom if feasible;
[1007] (C₃₋₇)cycloalkoxy means a cycloalkyl group having 3-7 carbon atoms, with the same meaning as previously defined, attached via a ring carbon atom to an exocyclic oxygen atom;
[1008] (C₆₋₁₀)aryl means an aromatic hydrocarbon group having 6-10 carbon atoms, such as phenyl, naphthyl, tetrahydronaphthyl or indenyl; the preferred (C₆₋₁₀)aryl group is phenyl;
[1009] (C₁₋₅)heteroaryl means a substituted or unsubstituted aromatic group having 1-5 carbon atoms and 1-4 heteroatoms selected from N, O and/or S, wherein the (C₁₋₅)heteroaryl may optionally be substituted; preferred (C₁₋₅)heteroaryl groups are tetrazolyl, imidazolyl, thiadiazolyl, pyridyl, pyrimidyl, triazinyl, thienyl or furyl, and the more preferred (C₁₋₅)heteroaryl is pyrimidyl;
[1010] [(C₁₋₄)alkyl]amino means an amino group, monosubstituted with an alkyl group containing 1-4 carbon atoms having the same meaning as previously defined; the preferred [(C₁₋₄)alkyl]amino group is methylamino;
[1011] di[(C₁₋₄)alkyl]amino means an amino group, disubstituted with alkyl group(s), each containing 1-4 carbon atoms and having the same meaning as previously defined; the preferred di[(C₁₋₄)alkyl]amino group is dimethylamino;
[1012] halogen means fluorine, chlorine, bromine or iodine;
[1013] (C₁₋₃)alkyl-C(O)—S—(C₁₋₃)alkyl means an alkyl-carbonyl-thio-alkyl group, each of the alkyl groups having 1 to 3 carbon atoms with the same meaning as previously defined;
[1014] (C₃₋₇)cycloalkenyl means a cycloalkenyl group having 3-7 carbon atoms, preferably 5-7 carbon atoms; preferred (C₃₋₇)cycloalkenyl groups are cyclopentenyl or cyclohexenyl; and cyclohexenyl groups are most preferred;
[1015] (C₂₋₆)heterocycloalkenyl means a heterocycloalkenyl group having 2-6 carbon atoms, preferably 3-5 carbon atoms; and 1 heteroatom selected from N, O and/or S; the preferred (C₂₋₆)heterocycloalkenyl groups are oxycyclohexenyl and azacyclohexenyl groups.
[1016] In the above definitions with multifunctional groups, the attachment point is at the last group.
[1017] When, in the definition of a substituent, is indicated that “all of the alkyl groups” of said substituent are optionally substituted, this also includes the alkyl moiety of an alkoxy group.
[1018] A circle in a ring of Formula (8) indicates that the ring is aromatic.
[1019] Depending on the ring formed, the nitrogen, if present in X or Y, may carry a hydrogen.

[1020] In a preferred embodiment, the invention relates to a compound according to Formula (8) wherein B₁ is C(R₇); B₂ is C(R₈); B₃ is C(R₉) and B₄ is C(R₁₀).

[1021] In other embodiments, the BTK inhibitors include, but are not limited to, those compounds described in International Patent Application Publication No. WO 2013/010869 and U.S. Patent Application Publication No. US 2014/0155406 A1, the disclosures of each of which are specifically incorporated by reference herein.

[1022] In an embodiment, the BTK inhibitor is a compound of Formula (9):

[chemical structure]

or a pharmaceutically acceptable salt, solvate, hydrate, cocrystal, or prodrug thereof, wherein:
[1023] Lₐ is CH₂, O, NH or S;
[1024] Ar is a substituted or unsubstituted aryl, or a substituted or unsubstituted heteroaryl;
[1025] Y is an optionally substituted group selected from the group consisting of alkyl, heteroalkyl, cycloalkyl, heterocycloalkyl, aryl and heteroaryl;
[1026] Z is C(═O), OC(═O), NRC(═O), C(═S), S(═O)ₓ, OS(═O)ₓ or NRS(═O)ₓ, where x is 1 or 2;
[1027] R⁷ and R⁸ are each independently H; or R⁷ and R⁸ taken together form a bond;
[1028] R⁶ is H; and
[1029] R is H or (C₁₋₆)alkyl.

[1030] In a preferred embodiment, the BTK inhibitor is ibrutinib or a pharmaceutically acceptable salt, solvate, hydrate, cocrystal, or prodrug thereof. In a preferred embodiment, the BTK inhibitor is (R)-1-(3-(4-amino-3-(4-phenoxyphenyl)-1H-pyrazolo[3,4-d]pyrimidin-1-yl)piperidin-1-yl)prop-2-en-1-one. In a preferred embodiment, the BTK inhibitor is 1-[(3R)-3-[4-amino-3-(4-phenoxyphenyl)-1H-pyrazolo[3,4-d]pyrimidin-1-yl]piperidin-1-yl]prop-2-en-1-one. In a preferred exemplary embodiment, the BTK inhibitor is (S)-1-(3-(4-amino-3-(4-phenoxyphenyl)-1H-pyrazolo[3,4-d]pyrimidin-1-yl)piperidin-1-yl)prop-2-en-1-one. In a preferred embodiment, the BTK inhibitor has the structure of Formula (10):

[chemical structure]

or an enantiomer thereof, or a pharmaceutically acceptable salt, solvate, hydrate, cocrystal, or prodrug thereof.

[1031] In an exemplary embodiment, the BTK inhibitor is a compound of Formula (11):

[chemical structure]

or a pharmaceutically acceptable salt, solvate, hydrate, cocrystal, or prodrug thereof,
wherein:
[1032] Lₐ is CH₂, O, NH or S;
[1033] Ar is a substituted or unsubstituted aryl, or a substituted or unsubstituted heteroaryl;
[1034] Y is an optionally substituted group selected from the group consisting of alkyl, heteroalkyl, cycloalkyl, heterocycloalkyl, aryl and heteroaryl;
[1035] Z is C(═O), OC(═O), NRC(═O), C(═S), S(═O), OS(═O)ₓ or NRS(═O), where x is 1 or 2;
[1036] R⁷ and R⁸ are each H; or R⁷ and R⁸ taken together form a bond;
[1037] R⁶ is H; and
[1038] R is H or (C₁₋₆)alkyl.

[1039] In an embodiment, the BTK inhibitor is a compound of Formula (12):

[chemical structure]

or a pharmaceutically acceptable salt, solvate, hydrate, cocrystal, or prodrug thereof,
wherein:
[1040] Lₐ is CH₂, O, NH or S;
[1041] Ar is a substituted or unsubstituted aryl, or a substituted or unsubstituted heteroaryl;
[1042] Y is an optionally substituted group selected from the group consisting of alkyl, heteroalkyl, cycloalkyl, heterocycloalkyl, aryl and heteroaryl;
[1043] Z is C(═O), OC(═O), NRC(═O), C(═S), S(═O)ₓ, OS(═O)ₓ or NRS(═O)ₓ, where x is 1 or 2;
[1044] R⁷ and R⁸ are each H; or R⁷ and R⁸ taken together form a bond;
[1045] R⁶ is H; and
[1046] R is H or (C₁₋₆)alkyl.

[1047] In an embodiment, the BTK inhibitor is a compound of Formula (13):

[chemical structure]

or a pharmaceutically acceptable salt, solvate, hydrate, cocrystal, or prodrug thereof,
wherein:
[1048] Lₐ is CH₂, O, NH or S;
[1049] Ar is a substituted or unsubstituted aryl, or a substituted or unsubstituted heteroaryl;
[1050] Y is an optionally substituted group selected from the group consisting of alkyl, heteroalkyl, cycloalkyl, heterocycloalkyl, aryl and heteroaryl;
[1051] Z is C(═O), OC(═O), NRC(═O), C(═S), S(═O), OS(═O)ₓ or NRS(═O), where x is 1 or 2;
[1052] R⁷ and R⁸ are each H; or R⁷ and R⁸ taken together form a bond;
[1053] R⁶ is H; and
[1054] R is H or (C₁₋₆)alkyl.

[1055] In an embodiment, the BTK inhibitor is a compound disclosed in U.S. Pat. No. 7,459,554, the disclosure of which is specifically incorporated herein by reference. In an embodiment, the BTK inhibitor is a compound of Formula (14):

[chemical structure]

or a pharmaceutically acceptable salt, solvate, hydrate, cocrystal, or prodrug thereof, wherein:
[1056] Q¹ is aryl¹, heteroaryl¹, cycloalkyl, heterocyclyl, cycloalkenyl, or heterocycloalkenyl, any of which is optionally substituted by one to five independent G¹ substituents;
[1057] R¹ is alkyl, cycloalkyl, bicycloalkyl, aryl, heteroaryl, aralkyl, heteroaralkyl, heterocyclyl, or heterobicycloalkyl, any of which is optionally substituted by one or more independent G¹¹ substituents;
[1058] G¹ and G⁴¹ are each independently halo, oxo, —CF₃, —OCF₃, —OR², —NR²R³(R^{3a})ⱼ₁, —C(O)R², —CO₂R², —CONR²R³, —NO₂, —CN, —S(O)ⱼ₁R², —SO₂NR²R³, NR²(C═O)R³, NR²(C═O)OR³, NR²(C═O)NR²R³, NR²S(O)ⱼ₁R³, —(C═S)OR², —(C═O)SR², NR²(C═NR³)NR^{2a}R^{3a}, —NR²(C═NR³)OR^{2a}, —NR²(C═NR³)SR^{3a}, —O(C═O)OR², —O(C═O)NR²R³, —O(C═O)SR², —S(C═O)OR², —S(C═O)NR²R³, (C₀₋₁₀)alkyl, (C₂₋₁₀)alkenyl, (C₂₋₁₀)alkynyl, (C₁₋₁₀)alkoxy(C₁₋₁₀)alkyl, (C₁₋₁₀)alkoxy(C₂₋₁₀)alkenyl, (C₁₋₁₀)alkoxy(C₂₋₁₀)alkynyl, (C₁₋₁₀)alkylthio(C₁₋₁₀) alkyl, (C₁₋₁₀)alkylthio(C₂₋₁₀)alkenyl, (C₁₋₁₀)alkylthio(C₂₋₁₀)alkynyl, cyclo(C₃₋₈)alkyl, cyclo(C₃₋₈)alkenyl, cyclo(C₃₋₈)alkyl(C₁₋₁₀)alkyl, cyclo(C₃₋₈)alkenyl(C₁₋₁₀)alkyl, cyclo(C₃₋₈) alkyl(C₂₋₁₀)alkenyl, cyclo(C₃₋₈)alkenyl(C₂₋₁₀)alkenyl, cyclo(C₃₋₈)alkyl(C₂₋₁₀)alkynyl, cyclo(C₃₋₈)alkenyl(C₂₋₁₀)alkynyl, heterocyclyl-(C₀₋₁₀)alkyl, heterocyclyl-(C₂₋₁₀)alkenyl, or heterocyclyl-(C₂₋₁₀)alkynyl, any of which is optionally substituted with one or more independent halo, oxo, —CF₃, —OCF₃, —OR²²², —NR²²²R³³³(R³³a)ⱼ₁ₐ, —C(O)R²²², —CO_{2R}²²², —CONR²²²R³³³, —NO₂, —CN, —S(O)ⱼ₁ₐR²²², —SO₂NR²²²R³³³, NR²²²(C═O)R³³³, NR²²²(C═O)OR³³³, NR²²²(C═O)NR²²², R³³³, NR²²²S(O)ⱼ₁ₐR³³³, —(C═S)OR²²², —(C═O)SR²²², —NR²²²(C═NR³³³)NR^{222a}R^{333a}, NR²²²(C═NR³³³)OR^{222a}, —NR²²²(C═R³³³)SR^{333a}, —O(C═O)OR²²², —O(C═O)NR²²², R³³³, —O(C═O)SR²²², —S(C═O)OR²²², or —S(C═O)NR²²²R³³³ substituents; or —(X¹)ₙ—(Y¹)ₘ—R⁴; or aryl-(C₀₋₁₀)alkyl, aryl-(C₂₋₁₀)alkenyl, or aryl-(C₂₋₁₀) alkynyl, any of which is optionally substituted with one or more independent halo, —CF₃, —OCF₃, —OR²²², —NR²²²R³³³(R^{333a})ⱼ₂ₐ, —C(O)R²²², —CO₂R²²², COR²²²R³³³, —NO₂, —CN, —S(O)ⱼ₂ₐR²²², —SO₂NR²²²R³³³, NR²²²(C═O)R³³³, NR²²²(C═O)OR³³³, NR²²²(C═O)NR²²²R³³³, NR²²²S(O)ⱼ₂ₐR³³³, —(C═S)OR²²², —(C═O)SR²²², —NR²²²(C═NR³³³)NR^{222a}R^{333a}, —NR²²²(C═NR³³³)OR^{222a}, —NR²²²(C═R³³³)SR^{333a}, —O(C═O)OR²²², —O(C═O)NR²²²R³³³, —O(C═O)SR²²², —S(C═O)OR²²², or —S(C═O)NR²²²R³³³ substituents; or hetaryl-(C₀₋₁₀)alkyl, hetaryl-(C₂₋₁₀)alkenyl, or hetaryl-(C₂₋₁₀)alkynyl, any of which is optionally substituted with one or more independent halo, —CF₃, —OCF₃, —OR²²², —NR²²², R³³³(R³³³a)j3a, —C(O)R²²², —CO₂R²²², —CONR²²²R³³³, —NO₂, —CN, —S(O)ⱼ₃ₐR²²², —SO₂NR²²²R³³³, NR²²²(C═O)R³³³, NR²²²(C═O)OR 33, NR²²²(C═O)NR²²²R³³³ NR²²²S(O)ⱼ₃ₐR³³³, —(C═S)OR²²², —(C═O)SR²²², —NR²²²(C═NR 33)R²²²aR³³³a, —NR²²²(C═NR³³³)OR^{222a}, —NR²²²(C═NR³³³)SR³³³a, O(C═O)OR²²², —O(C═O)NR²²²R³³³, —O(C═O)SR²²², —S(C═O)OR²²², or —S(C═O)NR²²²R³³³ substituents;
[1059] G¹¹ is halo, oxo, —CF₃, —OCF₃, —OR²¹, NR²¹R³(R^{3a1})ⱼ₄, —C(O)R²¹, —CO₂R²¹, —CONR²¹R³¹, —NO₂, —CN, —S(O)ⱼ₄R²¹, —SO₂NR²¹R³¹, NR²¹(C═O)R³¹, NR²¹(C═O)OR³¹, NR²¹(C═O)NR²¹R³¹, NR²¹S(O)ⱼ₄R³¹, —(C═S)OR²¹, —(C═O)SR²¹, —NR²¹(C═NR³¹)R^{2a1}R^{3a1}, —NR²¹(C═NR³¹)OR^{2a}, —NR²¹(C═NR³)SR^{3a1}, —O(C═O)OR²¹, —O(C═O)NR²¹R³¹, —O(C═O)SR²¹, —S(C═O)OR²¹, —S(C═O)NR²¹R³¹, —P(O)OR²¹OR³¹, (C₀₋₁₀)alkyl, (C₂₋₁₀)alkenyl, (C₂₋₁₀)alkynyl, (C₁₋₁₀) alkoxy(C₁₋₁₀)alkyl, (C₁₋₁₀)alkoxy(C₂₋₁₀)alkenyl, (C₁₋₁₀)alkoxy(C₂₋₁₀)alkynyl, (C₁₋₁₀) alkylthio(C₁₋₁₀)alkyl, (C₁₋₁₀)alkylthio(C₂₋₁₀)alkenyl, (C₁₋₁₀)alkylthio(C₂₋₁₀)alkynyl, cyclo(C₃₋₈)alkyl, cyclo(C₃₋₈)alkenyl, cyclo(C₃₋₈)alkyl(C₁₋₁₀)alkyl, cyclo(C₃₋s)alkenyl(C₁₋₁₀) alkyl, cyclo(C₃₋₈)alkyl(C₂₋₁₀)alkenyl, cyclo(C₃₋₈)alkenyl(C₂₋₁₀)alkenyl, cyclo(C₃₋₈) alkyl(C₂₋₁₀) alkynyl, cyclo(C₃₋₈)alkenyl(C₂₋₁₀)alkynyl, heterocyclyl-(C₀₋₁₀)alkyl, heterocyclyl-(C₂₋₁₀) alkenyl, or heterocyclyl-(C₂₋₁₀)alkynyl, any of which is optionally substituted with one or more independent halo, oxo, —CF₃, —OCF₃, —OR²²²¹, —NR²²²¹R³³³¹(R^{333a1})ⱼ₄ₐ, C(O)R²²²¹, —CO₂R²²²¹, —CONR²²²¹R³³³¹, —NO₂, —CN, —S(O)ⱼ₄ₐR²²²¹, —SO₂NR²²²¹R³³³¹, R²²²¹(C═O)R³³³¹, NR²²²¹(C═O)OR³³³¹, NR²²²¹(C═O)NR²²²¹R³³³¹, NR²²²¹S(O)ⱼ₄ₐR³³³¹, —(C═S)OR²²²¹, —(C═O)SR²²²¹, —NR²²²¹(C═NR³³³¹)NR^{222a1}R^{333a1}, —NR²²²¹(C═NR³³³¹)OR^{222a1}, —NR²²¹(C═NR³³³¹)SR^{333a1}, —O(C═O)OR²²²¹, —O(C═O)NR 2221R³³³¹, —O(C═O)SR²²²¹, —S(C═O)OR²²²¹, —P(O)OR²²²¹OR³³³¹, or —S(C═O)NR²²²¹R³³³¹ substituents; or aryl-(C₀₋₁₀)alkyl, aryl-(C₂₋₁₀)alkenyl, or aryl-(C₂₋₁₀)alkynyl, any of which is optionally substituted with one or more independent halo, —CF₃, —OCF₃, —OR²²²¹, —NR²²²¹R³³³¹(R^{333a1})ⱼ₅ₐ, —C(O)R²²²¹, CO₂R²²²¹, —CONR²²²R³³³¹, —NO₂, —CN, —S(O)ⱼ₅ₐR²²²¹, —SO₂NR²²²¹R³³³¹, NR²²²¹(C═O)R³³³¹, NR²²²¹(C═O)OR³³³¹, NR²²²¹(C═O)NR²²²¹R³³³¹, NR²²²¹S(O)ⱼ₅ₐR³³³¹, —(C═S)OR²²²¹, —(C═O)SR²²²¹, —NR²²²¹(C═NR³³³¹)NR^{222a1}R^{333a1}, —NR²²²¹(C═NR³³³¹)OR^{222a1}, —NR²²²¹(C═NR³³³¹)SR^{333a1}, O(C═O)OR²²²¹, —O(C═O)NR²²²¹R³³³¹, —O(C═O)SR²²²¹, —S(C═)OR²²²¹, —P(O)OR²²²¹R³³³¹, or —S(C═O)NR²²²¹R³³³¹ substituents; or hetaryl-(C₀₋₁₀) alkyl, hetaryl-(C₂₋₁₀)alkenyl, or hetaryl-(C₂₋₁₀)alkynyl, any of which is optionally substituted with one or more independent halo, —CF₃, —OCF₃, —OR²²²¹, —NR²²²¹R³³³¹(R^{333a1})ⱼ₆ₐ, —C(O)R²²²¹, —CO₂R²²²¹, —CONR²²²¹R³³³¹, —NO₂, —CN, —S(O)ⱼ₆ₐR²²²¹, —SO₂NR²²²¹R³³³¹, NR²²²¹(C═O)R³³³¹, NR²²²¹(C═O)OR³³³¹, NR²²²¹(C═O)NR²²²¹R³³³¹, NR²²²¹S(O)ⱼ₆ₐR³³³¹, —(C═S)OR²²²¹, —(C═O)SR²²²¹, NR²²²¹(C═NR³³³¹)NR^{222a1}R^{333a1}, —NR²²²¹ (C═NR³³³¹)OR^{222a1}, —NR²²²¹(C═NR³³³¹)SR^{333a1}, —O(C═O)OR²²²¹, —O(C═O)NR 2221R³³³¹, —O(C═O)SR²²²¹, —S(C═O)OR²²²¹, —P(O)OR²²²¹OR³³³¹, or —S(C═O)NR²²²¹R³³³¹ substituents; or
[1060] G¹¹ is taken together with the carbon to which it is attached to form a double bond which is substituted with R⁵ and G¹¹¹;
[1061] R², R^{2a}, R³, R^{3a}, R²²², R^{222a}, R³³³, R^{333a}, R²¹, R^{2a1}, R³¹, R^{3a1}, R²²²¹, R^{222a1}, R³³³¹, and R^{333a1} are each independently equal to (C₀₋₁₀)alkyl, (C₂₋₁₀)alkenyl, (C₂₋₁₀)alkynyl, (C₁₋₁₀)alkoxy(C₁₋₁₀)alkyl, (C₁₋₁₀)alkoxy(C₂₋₁₀)alkenyl, (C₁₋₁₀)alkoxy(C₂₋₁₀)alkynyl, (C₁₋₁₀)alkylthio(C₁₋₁₀)alkyl, (C₁₋₁₀)alkylthio(C₂₋₁₀)alkenyl, (C₁₋₁₀)alkylthio(C₂₋₁₀)alkynyl, cyclo(C₃₋₈)alkyl, cyclo(C₃₋₈)alkenyl, cyclo(C₃₋₈)alkyl(C₁₋₁₀)alkyl, cyclo(C₃₋₈)alkenyl(C₁₋₁₀)alkyl, cyclo(C₃₋₈)alkyl(C₂₋₁₀)alkenyl, cyclo(C₃₋₈)alkenyl(C₂₋₁₀)alkenyl, cyclo(C₃₋₈)alkyl(C₂₋₁₀)alkynyl, cyclo(C₃₋₈)alkenyl(C₂₋₁₀)alkynyl, heterocyclyl-(C₀₋₁₀)alkyl, heterocyclyl-(C₂₋₁₀)alkenyl, or heterocyclyl-(C₂₋₁₀)alkynyl, any of which is optionally substituted by one or more G¹¹¹ substituents; or aryl-(C₀₋₁₀)alkyl, aryl-(C₂₋₁₀)alkenyl, or aryl-(C₂₋₁₀)alkynyl, hetaryl-(C₀₋₁₀)alkyl, hetaryl-(C₂₋₁₀)alkenyl, or hetaryl-(C₂₋₁₀)alkynyl, any of which is optionally substituted by one or more G¹¹¹ substituents; or in the case of —NR²R³(R^{3a})ⱼ₁ or —NR²²²R³³³(R^{333a})ⱼ₁ₐ or —NR²²²R³³³(R³³³a)ⱼ₂ₐ or —NR²²²¹R³³³¹(R^{333a1})ⱼ₃ₐ or —NR²²²¹R³³³¹(R^{333a1})ⱼ₄ₐ or —NR²²²¹R³³³¹(R^{333a1})ⱼ₅ₐ or —NR²²²¹R³³³¹(R^{333a1})ⱼ₆ₐ, R² and R³ or R²²² and R³³³3 or R²²²¹ and R³³³¹ taken together with the nitrogen atom to which they are attached form a 3-10 membered saturated ring, unsaturated ring, heterocyclic saturated ring, or heterocyclic unsaturated ring, wherein said ring is optionally substituted by one or more G¹¹¹ substituents;
[1062] X¹ and Y¹ are each independently —O—, —NR⁷—, —S(O)ⱼ₇—, —CR⁵R⁶—, —N(C(O)OR⁷)—, —N(C(O)R⁷)—, —N(SO₂R⁷)—, —CH₂O—, —CH₂S—, —CH₂N(R⁷)—, —CH(NR⁷)—, —CH₂N(C(O)R⁷)—, —CH₂N(C(O)OR⁷)—, —CH₂N(SO₂R⁷)—, —CH(NHR⁷)—, —CH(NHC(O)R⁷)—, —CH(NHSO₂R⁷)—, —CH(NHC(O)OR⁷)—, —CH(OC(O)R⁷)—, —CH(OC(O)NHR⁷)—, —CH═CH—, —C.ident.C—, —C(═NOR⁷)—, —C(O)—, —CH(OR⁷)—, —C(O)N(R⁷)—, —N(R⁷)C(O)—, —N(R⁷)S(O)—, —N(R⁷)S(O)₂— —OC(O)N(R⁷)—, —N(R⁷)C(O)N(R⁷)—, —NR⁷C(O)O—, —S(O)N(R⁷)—, —S(O)₂N(R⁷)—, —N(C(O)R⁷)S(O)—, —N(C(O)R⁷)S(O)₂—, —N(R⁷)S(O)N(R⁷)—, —N(R⁷)S(O)₂N(R⁷)—, —C(O)N(R⁷)C(O)—, —S(O)N(R⁷)C(O)—, —S(O)₂N(R⁷)C(O)—, —OS(O)N(R⁷)—, —OS(O)₂N(R⁷)—, —N(R⁷)S(O)O—, —N(R⁷)S(O)₂O—, —N(R⁷)S(O)C(O)—, —N(R⁷)S(O)₂C(O)—, —SON(C(O)R⁷)—, —SO₂N(C(O)R⁷)—, —N(R⁷)SON(R⁷)—, —N(R⁷)SO₂N(R⁷)—, —C(O)O—, —N(R⁷)P(OR⁸)O—, —N(R⁷)P(OR⁸)—, —N(R⁷)P(O)(OR⁸)O—, —N(R⁷)P(O)(OR⁸)—, —N(C(O)R⁷)P(OR⁸)O—, —N(C(O)R⁷)P(OR⁸)—, —N(C(O)R⁷)P(O)(OR⁸)O—, —N(C(O)R⁷)P(OR⁸)—, —CH(R⁷)S(O)—, —CH(R⁷)S(O)₂—, —CH(R⁷)N(C(O)OR⁷)—, —CH(R⁷)N(C(O)R⁷)—, —CH(R⁷)N(SO₂R⁷)—, —CH(R⁷)O—, —CH(R⁷)S—, —CH(R⁷)N(R⁷)—, —CH(R⁷)N(C(O)R⁷)—, —CH(R⁷)N(C(O)OR⁷)—, —CH(R⁷)N(SO₂R⁷)—, —CH(R⁷)C(═NOR⁷)—, —CH(R⁷)C(O)—, —CH(R⁷)CH(OR⁷)—, —CH(R⁷)C(O)N(R⁷)—, —CH(R⁷)N(R⁷)C(O)—, —CH(R⁷)N(R⁷)S(O)—, —CH(R⁷)N(R⁷)S(O)₂—, —CH(R⁷)OC(O)N(R⁷)—, —CH(R⁷)N(R⁷)C(O)N(R⁷)—, —CH(R⁷)NR⁷C(O)O—, —CH(R⁷) S(O)N(R⁷)—, —CH(R⁷) S(O)₂N(R⁷)—, —CH(R⁷)N(C(O)R⁷)S(O)—, —CH(R⁷)N(C(O)R⁷)S(O)—, —CH(R⁷)N(R⁷)S(O)N(R⁷)—, —CH(R⁷)N(R⁷)S(O)₂N(R⁷)—, —CH(R⁷)C(O)N(R⁷)C(O)—, —CH(R⁷)S(O)N(R⁷)C(O)—, —CH(R⁷)S(O)₂N(R⁷)C(O)—, —CH(R⁷)OS(O)N(R⁷)—, —CH(R⁷)OS(O)₂N(R)—, —CH(R⁷)N(R⁷)S(O)O—, —CH(R⁷)N(R⁷)S(O)₂O—, —CH(R⁷)N(R⁷)S(O)C(O)—, —CH(R⁷)N(R⁷)S(O)₂C(O)—, —CH(R⁷)SON(C(O)R⁷)—, —CH(R⁷)SO₂N(C(O)R⁷)—, —CH(R⁷)N(R⁷)SON(R⁷)—, —CH(R⁷)N(R⁷)SO₂N(R⁷)—, —CH(R⁷)C(O)O—, —CH(R⁷)N(R⁷)P(OR⁸)O—, —CH(R⁷)N(R⁷)P(OR⁸)—, —CH(R⁷)N(R⁷)P(O)(OR⁸)O—, —CH(R⁷)N(R⁷)P(O)(OR⁸)—, —CH(R⁷)N(C(O)R⁷)P(OR⁸)O—, —CH(R⁷)N(C(O)R⁷)P(OR⁷)—, —CH(R⁷)N(C(O)R⁷)P(O)(OR⁸)O—, or —CH(R⁷)N(C(O)R⁷)P(OR⁸)—;
[1063] or X¹ and Y¹ are each independently represented by one of the following structural formulas:

[chemical structure]

[1064] R¹⁰, taken together with the phosphinamide or phosphonamide, is a 5-, 6-, or 7-membered aryl, heteroaryl or heterocyclyl ring system;
[1065] R⁵, R⁶, and G¹¹¹ are each independently a (C₀₋₁₀)alkyl, (C₂₋₁₀)alkenyl, (C₂₋₁₀)alkynyl, (C₁₋₁₀)alkoxy(C₁₋₁₀)alkyl, (C₁₋₁₀)alkoxy(C₂₋₁₀)alkenyl, (C₁₋₁₀)alkoxy(C₂₋₁₀)alkynyl, (C₁₋₁₀)alkylthio(C₁₋₁₀)alkyl, (C₁₋₁₀)alkylthio(C₂₋₁₀)alkenyl, (C₁₋₁₀)alkylthio(C₂₋₁₀)alkynyl, cyclo(C₃₋₈)alkyl, cyclo(C₃₋₈)alkenyl, cyclo(C₃₋₈)alkyl(C₁₋₁₀)alkyl, cyclo(C₃₋₈)alkenyl(C₁₋₁₀)alkyl, cyclo(C₃₋₈)alkyl(C₂₋₁₀)alkenyl, cyclo(C₃₋₈)alkenyl(C₂₋₁₀)alkenyl, cyclo(C₃₋₈)alkyl(C₂₋₁₀)alkynyl, cyclo(C₃₋₈)alkenyl(C₂₋₁₀)alkynyl, heterocyclyl-(C₀₋₁₀)alkyl, heterocyclyl-(C₂₋₁₀)alkenyl, or heterocyclyl-(C₂₋₁₀)alkynyl, any of which is optionally substituted with one or more independent halo, —CF₃, —OCF₃, —OR⁷⁷, —NR⁷⁷R⁸⁷, —C(O)R⁷⁷, —CO₂R⁷⁷, —CONR⁷⁷R⁸⁷, —NO₂, —CN, —S(O)ⱼ₅ₐR⁷⁷, —SO₂NR⁷⁷R⁸⁷, NR⁷⁷(C═O)R⁸⁷, NR⁷⁷(C═O)OR⁸⁷, NR⁷⁷(C═O)NR⁷⁸R⁸⁷, NR⁷⁷S(O)ⱼ₅ₐR⁸⁷, —(C═S)OR⁷⁷, —(C═O)SR⁷⁷, —NR⁷⁷(C═NR⁸⁷)NR⁷⁸R⁸⁸, —NR⁷⁷(C═NR⁸⁷)OR⁷⁸, —NR⁷⁷(C═NR⁸⁷)SR⁷⁸, —O(C═O)OR⁷⁷, —O(C═O)NR⁷⁷R⁸⁷, —O(C═O)SR⁷⁷, —S(C═O)OR⁷⁷, —P(O)OR⁷⁷OR⁸⁷, or —S(C═O)NR⁷⁷R⁸⁷ substituents; or aryl-(C₀₋₁₀)alkyl, aryl-(C₂₋₁₀)alkenyl, or aryl-(C₂₋₁₀)alkynyl, any of which is optionally substituted with one or more independent halo, —CF₃, —OCF₃, —OR⁷⁷, —NR⁷⁷R⁸⁷, —C(O)R⁷⁷, CO₂R⁷⁷, —CONR⁷⁷R⁸⁷, —NO₂, —CN, —S(O)ⱼ₅ₐR⁷⁷, —SO₂NR⁷⁷R⁸⁷, NR⁷⁷(C═O)R⁷⁷, NR⁷⁷(C═O)OR⁸⁷, NR⁷⁷(C═O)NR⁷⁸R⁸⁷, NR⁷⁷S(O)ⱼ₅ₐR⁸⁷, —(C═S)OR⁷⁷, —(C═O)SR⁷⁷, —NR⁷⁷(C═NR⁸⁷)NR⁷⁸R⁸⁸, —NR⁷⁷(C═NR⁸⁷)OR⁷⁸, —NR⁷⁷(C═NR⁸⁷)SR⁷⁸, —O(C═O)OR⁷⁷, —O(C═O)NR⁷⁷R⁸⁷, —O(C═O)SR⁷⁷, —S(C═O)OR⁷⁷, —P(O)OR⁷⁷OR⁸⁷, or —S(C═O)NR⁷⁷R⁸⁷ substituents; or hetaryl-(C₀₋₁₀)alkyl, hetaryl-(C₂₋₁₀)alkenyl, or hetaryl-(C₂₋₁₀)alkynyl, any of which is optionally substituted with one or more independent halo, —CF₃, —OCF₃, —OR⁷⁷, —NR⁷⁷R⁸⁷, —C(O)R⁷⁷, —CO₂R⁷⁷, —CONR⁷⁷R⁸⁷, —NO₂, —CN, —S(O)ⱼ₅ₐR⁷⁷, —SO₂NR⁷⁷R⁸⁷, NR⁷⁷(C═O)R⁸⁷, NR⁷⁷(C═)OR⁸⁷, NR⁷⁷(C═O)NR⁷⁸R⁸⁷, NR⁷⁷S(O)ⱼ₅ₐR⁸⁷, —(C═S)OR⁷⁷, —(C═O)SR⁷⁷, —NR⁷⁷(C═NR⁸⁷)NR⁷⁸R⁸⁸, —NR⁷⁷(C═NR⁸⁷)OR⁷⁸, —NR⁷⁷(C═NR⁸⁷)SR⁷⁸, —O(C═O)OR⁷⁷, —O(C═O)NR⁷⁷R⁸⁷, —O(C═O)SR⁷⁷, —S(C═O)OR⁷⁷, —P(O)OR⁷⁷OR⁸⁷, or —S(C═O)NR⁷⁷R⁸⁷ substituents; or R⁵ with R⁶ taken together with the respective carbon atom to which they are attached, form a 3-10 membered saturated or unsaturated ring, wherein said ring is optionally substituted with R⁶⁹; or R⁵ with R⁶ taken together with the respective carbon atom to which they are attached, form a 3-10 membered saturated or unsaturated heterocyclic ring, wherein said ring is optionally substituted with R⁶⁹;
[1066] R⁷ and R⁸ are each independently H, acyl, alkyl, alkenyl, aryl, heteroaryl, heterocyclyl or cycloalkyl, any of which is optionally substituted by one or more G111 substituents;
[1067] R⁴ is H, alkyl, alkenyl, alkynyl, aryl, heteroaryl, cycloalkyl, heterocyclyl, cycloalkenyl, or heterocycloalkenyl, any of which is optionally substituted by one or more G⁴¹ substituents;
[1068] R⁶⁹ is equal to halo, OR⁷⁸, —SH, —NR⁷⁸R⁸⁸, —CO₂R⁷⁸, —CONR⁷⁸R⁸⁸, —NO₂, —CN, —S(O)ⱼ₈R⁷⁸, —SO₂NR⁷⁸R⁸⁸, (C₀₋₁₀)alkyl, (C₂₋₁₀)alkenyl, (C₂₋₁₀)alkynyl, (C₁₋₁₀)alkoxy(C₁₋₁₀)alkyl, (C₁₋₁₀)alkoxy(C₂₋₁₀)alkenyl, (C₁₋₁₀)alkoxy(C₂₋₁₀)alkynyl, (C₁₋₁₀)alkylthio(C₁₋₁₀)alkyl, (C₁₋₁₀)alkylthio(C₂₋₁₀)alkenyl, (C₁₋₁₀)alkylthio(C₂₋₁₀)alkynyl, cyclo(C₃₋₈)alkyl, cyclo(C₃₋₈)alkenyl, cyclo(C₃₋₈)alkyl(C₁₋₁₀)alkyl, cyclo(C₃₋₈)alkenyl(C₁₋₁₀)alkyl, cyclo(C₃₋₈)alkyl(C₂₋₁₀)alkenyl, cyclo(C₃₋₈)alkenyl(C₂₋₁₀)alkenyl, cyclo(C₃-g)alkyl(C₂₋₁₀)alkynyl, cyclo(C₃₋₈)alkenyl(C₂₋₁₀)alkynyl, heterocyclyl-(C₀₋₁₀)alkyl, heterocyclyl-(C₂₋₁₀)alkenyl, or heterocyclyl-(C₂₋₁₀)alkynyl, any of which is optionally substituted with one or more independent halo, cyano, nitro, —OR⁷⁷⁸, —SO₂NR⁷⁷⁸R⁸⁸⁸, or —NR⁷⁷⁸R⁸⁸⁸ substituents; or aryl-(C₀₋₁₀)alkyl, aryl-(C₂₋₁₀)alkenyl, or aryl-(C₂₋₁₀)alkynyl, any of which is optionally substituted with one or more independent halo, cyano, nitro, —OR⁷⁷⁸, (C₁₋₁₀)alkyl, (C₂₋₁₀)alkenyl, (C₂₋₁₀)alkynyl, halo(C₁₋₁₀)alkyl, halo(C₂₋₁₀)alkenyl, halo(C₂₋₁₀)alkynyl, —COOH, (C₁₋₄)alkoxycarbonyl, —CONR⁷⁷⁸R⁸⁸⁸, —SO₂N778R⁸⁸⁸, or —NR⁷⁷⁸R⁸⁸⁸ substituents; or hetaryl-(C₀₋₁₀)alkyl, hetaryl-(C₂₋₁₀)alkenyl, or hetaryl-(C₂₋₁₀)alkynyl, any of which is optionally substituted with one or more independent halo, cyano, nitro, —OR⁷⁷⁸, (C₁₋₁₀)alkyl, (C₂₋₁₀)alkenyl, (C₂₋₁₀)alkynyl, halo(C₁₋₁₀)alkyl, halo(C₂₋₁₀)alkenyl, halo(C₂₋₁₀)alkynyl, —COOH, (C₁₋₄)alkoxycarbonyl, —CONR⁷⁷⁸R₈₈₈, —SO₂N⁷⁷⁸R⁸⁸⁸, or —NR⁷⁷⁸R⁸⁸⁸ substituents; or mono(C₁₋₆alkyl)amino(C₁₋₆)alkyl, di((C₁₋₆)alkyl)amino(C₁₋₆)alkyl, mono(aryl)amino(C₁₋₆)alkyl, di(aryl)amino(C₁₋₆)alkyl, or —N((C₁₋₆)alkyl)-(C₁₋₆)alkyl-aryl, any of which is optionally substituted with one or more independent halo, cyano, nitro, —OR⁷⁷⁸, (C₁₋₁₀)alkyl, (C₂₋₁₀)alkenyl, (C₂₋₁₀)alkynyl, halo(C₁₋₁₀)alkyl, halo(C₂₋₁₀)alkenyl, halo(C₂₋₁₀)alkynyl, —COOH, (C₁₋₄)alkoxycarbonyl, —CONR⁷⁷⁸R⁸⁸⁸, —SO₂NR⁷⁷⁸R⁸⁸⁸, or —NR⁷⁷⁸R⁸⁸⁸ substituents; or in the case of —NR⁷⁸R⁸⁸, R⁷⁸ and R⁸⁸ taken together with the nitrogen atom to which they are attached form a 3-10 membered saturated ring, unsaturated ring, heterocyclic saturated ring, or heterocyclic unsaturated ring, wherein said ring is optionally substituted with one or more independent halo, cyano, hydroxy, nitro, (C₁₋₁₀)alkoxy, —SO₂NR⁷⁷⁸R⁸⁸⁸, or —NR⁷⁷⁸R⁸⁸⁸ substituents;
[1069] R⁷⁷, R⁷⁸, R⁸⁷, R⁸⁸, R⁷⁷⁸, and R⁸⁸⁸ are each independently (C₀₋₁₀)alkyl, (C₂₋₁₀)alkenyl, (C₂₋₁₀)alkynyl, (C₁₋₁₀)alkoxy(C₁₋₁₀)alkyl, (C₁₋₁₀)alkoxyC₂₋₁₀)alkenyl, (C₁₋₁₀)alkoxy(C₂₋₁₀)alkynyl, (C₁₋₁₀)alkylthio(C₁₋₁₀)alkyl, (C₁₋₁₀)alkylthio(C₂₋₁₀)alkenyl, (C₁₋₁₀)alkylthio(C₂₋₁₀)alkynyl, cyclo(C₃₋₈)alkyl, cyclo(C₃₋₈)alkenyl, cyclo(C₃₋₈)alkyl(C₁₋₁₀)alkyl, cyclo(C₃₋₈)alkenyl(C₁₋₁₀)alkyl, cyclo(C₃₋₈)alkyl(C₂₋₁₀)alkenyl, cyclo(C₃₋₈)alkenyl(C₂₋₁₀)alkenyl, cyclo(C₃₋₈)alkyl(C₂₋₁₀)alkynyl, cyclo(C₃₋₈)alkenyl(C₂₋₁₀)alkynyl, heterocyclyl-(C₀₋₁₀)alkyl, heterocyclyl-(C₂₋₁₀)alkenyl, heterocyclyl-(C₂₋₁₀)alkynyl, (C₁₋₁₀)alkylcarbonyl, (C₂₋₁₀)alkenylcarbonyl, (C₂₋₁₀)alkynylcarbonyl, (C₁₋₁₀)alkoxycarbonyl, (C₁₋₁₀)alkoxycarbonyl(C₁₋₁₀)alkyl, mono(C₁₋₆)alkylaminocarbonyl, di(C₁₋₆)alkylaminocarbonyl, mono(aryl)aminocarbonyl, di(aryl)aminocarbonyl, or (C₁₋₁₀)alkyl(aryl)aminocarbonyl, any of which is optionally substituted with one or more independent halo, cyano, hydroxy, nitro, (C₁₋₁₀)alkoxy, —SO₂N((C₀₋₄)alkyl)((C₀₋₄)alkyl), or —N((C₀₋₄)alkyl)((C₀₋₄)alkyl) substituents; or aryl-(C₀₋₁₀)alkyl, aryl-(C₂₋₁₀)alkenyl, or aryl-(C₂₋₁₀)alkynyl, any of which is optionally substituted with one or more independent halo, cyano, nitro, —O((C₀₋₄)alkyl), (C₁₋₁₀)alkyl, (C₂₋₁₀)alkenyl, (C₂₋₁₀)alkynyl, halo(C₁₋₁₀)alkyl, halo(C₂₋₁₀)alkenyl, halo(C₂₋₁₀)alkynyl, —COOH, (C₁₋₄)alkoxycarbonyl, —CON((C₀₋₄)alkyl)((C₀₋₁₀)alkyl), —SO₂N((C₀₋₄)alkyl)((C₀₋₄)alkyl), or —N((C₀₋₄)alkyl)((C₀₋₄)alkyl) substituents; or hetaryl-(C₀₋₁₀)alkyl, hetaryl-(C₂₋₁₀)alkenyl, or hetaryl-(C₂₋₁₀)alkynyl, any of which is optionally substituted with one or more independent halo, cyano, nitro, —O((C₀₋₄)alkyl), (C₁₋₁₀)alkyl, (C₂₋₁₀)alkenyl, (C₂₋₁₀)alkynyl, halo(C₁₋₁₀)alkyl, halo(C₂₋₁₀)alkenyl, halo(C₂₋₁₀)alkynyl, —COOH, (C₁₋₄)alkoxycarbonyl, —CON((C₀₋₄)alkyl)((C₀₋₄)alkyl), —SO₂N((C₀₋₄)alkyl)((C₀₋₄)alkyl), or —N((C₀₋₄)alkyl)((C₀₋₄)alkyl) substituents; or mono((C₁₋₆)alkyl)amino(C₁₋₆)alkyl, di((C₁₋₆)alkyl)amino(C₁₋₆)alkyl, mono(aryl)amino(C₁₋₆)alkyl, di(aryl)amino(C₁₋₆)alkyl, or —N((C₁₋₆)alkyl)-(C₁₋₆)alkyl-aryl, any of which is optionally substituted with one or more independent halo, cyano, nitro, —O((C₀₋₄)alkyl), (C₁₋₁₀)alkyl, (C₂₋₁₀)alkenyl, (C₂₋₁₀)alkynyl, halo(C₁₋₁₀)alkyl, halo(C₂₋₁₀)alkenyl, halo(C₂₋₁₀)alkynyl, —COOH, (C₁₋₄)alkoxycarbonyl, —CON((C₀₋₄)alkyl)((C₀₋₄)alkyl), —SO₂N((C₀₋₄)alkyl)((C₀₋₄)alkyl), or —N((C₀₋₄)alkyl)((C₀₋₄)alkyl) substituents; and
[1070] n, m, j1, j1a, j2a, j3a, j4, j4a, j5a, j6a, j7, and j8 are each independently equal to 0, 1, or 2.

[1071] In an embodiment, the BTK inhibitor is a compound selected from the structures disclosed in U.S. Pat. Nos. 8,450,335 and 8,609,679, and U.S. Patent Application Publication Nos. 2010/0029610 A1, 2012/0077832 A1, 2013/0065879 A1, 2013/0072469 A1, and 2013/0165462 A1, the disclosures of which are incorporated by reference herein. In an embodiment, the BTK inhibitor is a compound of Formula (15) or Formula (16):

[chemical structure]

or a pharmaceutically acceptable salt, solvate, hydrate, cocrystal, or prodrug thereof, wherein:
[1072] Ring A is an optionally substituted group selected from phenyl, a 3-7 membered saturated or partially unsaturated carbocyclic ring, an 8-10 membered bicyclic saturated, partially unsaturated or aryl ring, a 5-6 membered monocyclic heteroaryl ring having 1-4 heteroatoms independently selected from nitrogen, oxygen, or sulfur, a 4-7 membered saturated or partially unsaturated heterocyclic ring having 1-3 heteroatoms independently selected from nitrogen, oxygen, or sulfur, an optionally substituted 7-10 membered bicyclic saturated or partially unsaturated heterocyclic ring having 1-5 heteroatoms independently selected from nitrogen, oxygen, or sulfur, or an 8-10 membered bicyclic heteroaryl ring having 1-5 heteroatoms independently selected from nitrogen, oxygen, or sulfur;
[1073] Ring B is an optionally substituted group selected from phenyl, a 3-7 membered saturated or partially unsaturated carbocyclic ring, an 8-10 membered bicyclic saturated, partially unsaturated or aryl ring, a 5-6 membered monocyclic heteroaryl ring having 1-4 heteroatoms independently selected from nitrogen, oxygen, or sulfur, a 4-7 membered saturated or partially unsaturated heterocyclic ring having 1-3 heteroatoms independently selected from nitrogen, oxygen, or sulfur, an optionally substituted 7-10 membered bicyclic saturated or partially unsaturated heterocyclic ring having 1-5 heteroatoms independently selected from nitrogen, oxygen, or sulfur, or an 8-10 membered bicyclic heteroaryl ring having 1-5 heteroatoms independently selected from nitrogen, oxygen, or sulfur;
[1074] R¹ is a warhead group;
[1075] R^{y} is hydrogen, halogen, —CN, —CF₃, C₁₋₄ aliphatic, C₁₋₄ haloaliphatic, —OR, —C(O)R, or —C(O)N(R)₂;
[1076] each R group is independently hydrogen or an optionally substituted group selected from C₁₋₆ aliphatic, phenyl, an optionally substituted 4-7 membered heterocyclic ring having 1-2 heteroatoms independently selected from nitrogen, oxygen, or sulfur, or a 5-6 membered monocyclic heteroaryl ring having 1-4 heteroatoms independently selected from nitrogen, oxygen, or sulfur;
[1077] W¹ and W² are each independently a covalent bond or a bivalent C₁₋₃ alkylene chain wherein one methylene unit of W¹ or W² is optionally replaced by —NR²—, —N(R²)C(O)—, —C(O)N(R²)—, —N(R²)SO₂—, —SO₂N(R²)—, —O—, —C(O)—, —OC(O)—, —C(O)O—, —S—, —SO— or —SO₂—;
[1078] R² is hydrogen, optionally substituted C₁₋₄ aliphatic, or —C(O)R, or:
[1079] R² and a substituent on Ring A are taken together with their intervening atoms to form a 4-6 membered saturated, partially unsaturated, or aromatic fused ring, or:
[1080] R² and R^{y} are taken together with their intervening atoms to form an optionally substituted 4-7 membered partially unsaturated or aromatic fused ring;
[1081] m and p are independently 0-4; and
[1082] R^{x} and R^{v} are independently selected from —R, halogen, —OR, —O(CH₂)_{q}OR, —CN, —NO₂, —SO₂R, —SO₂N(R)₂, —SOR, —C(O)R, —CO₂R, —C(O)N(R)₂, —NRC(O)R, —NRC(O)NR₂, —NRSO₂R, or —N(R)₂, wherein q is 1-4; or:
[1083] R^{x} and R¹ when concurrently present on Ring B are taken together with their intervening atoms to form an optionally substituted 5-7 membered saturated, partially unsaturated, or aryl ring having 0-3 heteroatoms independently selected from nitrogen, oxygen, or sulfur, wherein said ring is substituted with a warhead group and 0-3 groups independently selected from oxo, halogen, —CN, or C₁₋₆ aliphatic; or
[1084] R^{v} and R¹ when concurrently present on Ring A are taken together with their intervening atoms to form an optionally substituted 5-7 membered saturated, partially unsaturated, or aryl ring having 0-3 heteroatoms independently selected from nitrogen, oxygen, or sulfur, wherein said ring is substituted with a warhead group and 0-3 groups independently selected from oxo, halogen, —CN, or C₁₋₆ aliphatic.

[1085] In an embodiment, the BTK inhibitor is a compound of Formula (15) or Formula (16), wherein:
[1086] Ring A is selected from phenyl, a 3-7 membered saturated or partially unsaturated carbocyclic ring, an 8-10 membered bicyclic saturated, partially unsaturated or aryl ring, a 5-6 membered monocyclic heteroaryl ring having 1-4 heteroatoms independently selected from nitrogen, oxygen, or sulfur, an optionally substituted 4-7 membered saturated or partially unsaturated heterocyclic ring having 1-3 heteroatoms independently selected from nitrogen, oxygen, or sulfur, an optionally substituted 7-10 membered bicyclic saturated or partially unsaturated heterocyclic ring having 1-5 heteroatoms independently selected from nitrogen, oxygen, or sulfur, or an 8-10 membered bicyclic heteroaryl ring having 1-5 heteroatoms independently selected from nitrogen, oxygen, or sulfur;
[1087] Ring B is selected from phenyl, a 3-7 membered saturated or partially unsaturated carbocyclic ring, an 8-10 membered bicyclic saturated, partially unsaturated or aryl ring, a 5-6 membered monocyclic heteroaryl ring having 1-4 heteroatoms independently selected from nitrogen, oxygen, or sulfur, an optionally substituted 4-7 membered saturated or partially unsaturated heterocyclic ring having 1-3 heteroatoms independently selected from nitrogen, oxygen, or sulfur, an optionally substituted 7-10 membered bicyclic saturated or partially unsaturated heterocyclic ring having 1-5 heteroatoms independently selected from nitrogen, oxygen, or sulfur, or an 8-10 membered bicyclic heteroaryl ring having 1-5 heteroatoms independently selected from nitrogen, oxygen, or sulfur;
[1088] R¹ is -L-Y, wherein:
[1089] L is a covalent bond or a bivalent C₁₋ₛ saturated or unsaturated, straight or branched, hydrocarbon chain, wherein one, two, or three methylene units of L are optionally and independently replaced by cyclopropylene, —NR—, —N(R)C(O)—, —C(O)N(R)—, —N(R)SO₂—, —SO₂N(R)—, —O—, —C(O)—, —OC(O)—, —C(O)O—, —S—, —SO—, —SO₂—, —C(═S)—, —C(═NR)—, —N═N—, or —C(═N₂)—;
[1090] Y is hydrogen, C₁₋₆ aliphatic optionally substituted with oxo, halogen, or CN, or a 3-10 membered monocyclic or bicyclic, saturated, partially unsaturated, or aryl ring having 0-3 heteroatoms independently selected from nitrogen, oxygen, or sulfur, and wherein said ring is substituted with at 1-4 groups independently selected from -Q-Z, oxo, NO₂, halogen, CN, or C₁₋₆ aliphatic, wherein:
[1091] Q is a covalent bond or a bivalent C₁₋₆ saturated or unsaturated, straight or branched, hydrocarbon chain, wherein one or two methylene units of Q are optionally and independently replaced by —NR—, —S—, —O—, —C(O)—, —SO—, or —SO₂—; and
[1092] Z is hydrogen or C₁₋₆ aliphatic optionally substituted with oxo, halogen, or CN;
[1093] R^{y} is hydrogen, halogen, —CN, —CF₃, C₁₋₄ aliphatic, C₁₋₄ haloaliphatic, —OR, —C(O)R, or —C(O)N(R)₂;
[1094] each R group is independently hydrogen or an optionally substituted group selected from C₁₋₆ aliphatic, phenyl, an optionally substituted 4-7 membered heterocylic ring having 1-2 heteroatoms independently selected from nitrogen, oxygen, or sulfur, or a 5-6 membered monocyclic heteroaryl ring having 1-4 heteroatoms independently selected from nitrogen, oxygen, or sulfur;
[1095] W¹ and W² are each independently a covalent bond or a bivalent C₁₋₃ alkylene chain wherein one methylene unit of W¹ or W² is optionally replaced by —NR²—, —N(R²)C(O)—, —C(O)N(R²)—, —N(R²)SO₂—, —SO₂N(R²)—, —O—, —C(O)—, —OC(O)—, —C(O)O—, —S—, —SO— or —SO₂—;
[1096] R² is hydrogen, optionally substituted C₁₋₆ aliphatic, or —C(O)R, or:
[1097] R² and a substituent on Ring A are taken together with their intervening atoms to form a 4-6 membered partially unsaturated or aromatic fused ring; or
[1098] R² and R^{y} are taken together with their intervening atoms to form a 4-6 membered saturated, partially unsaturated, or aromatic fused ring;
[1099] m and p are independently 0-4; and
[1100] R^{x} and R^{v} are independently selected from —R, halogen, —OR, —O(CH₂)_{q}OR, —CN, —NO₂, —SO₂R, —SO₂N(R)₂, —SOR, —C(O)R, —CO₂R, —C(O)N(R)₂, —NRC(O)R, —NRC(O)NR₂, —NRSO₂R, or —N(R)₂, wherein R is independently selected from the group consisting of hydrogen, cycloalkyl, alkenyl, cycloalkenyl, alkynyl, aryl, heteroaryl, and heterocyclyl; or:
[1101] R^{x} and R¹ when concurrently present on Ring B are taken together with their intervening atoms to form a 5-7 membered saturated, partially unsaturated, or aryl ring having 0-3 heteroatoms independently selected from nitrogen, oxygen, or sulfur, wherein said ring is substituted with a warhead group and 0-3 groups independently selected from oxo, halogen, —CN, or C₁₋₆ aliphatic; or
[1102] R^{v} and R¹ when concurrently present on Ring A are taken together with their intervening atoms to form a 5-7 membered saturated, partially unsaturated, or aryl ring having 0-3 heteroatoms independently selected from nitrogen, oxygen, or sulfur, wherein said ring is substituted with a warhead group and 0-3 groups independently selected from oxo, halogen, —CN, or C₁₋₆ aliphatic.

[1103] As defined generally above, Ring A is selected from phenyl, a 3-7 membered saturated or partially unsaturated carbocyclic ring, an 8-10 membered bicyclic saturated, partially unsaturated or aryl ring, a 5-6 membered monocyclic heteroaryl ring having 1-4 heteroatoms independently selected from nitrogen, oxygen, or sulfur, an optionally substituted 4-7 membered saturated or partially unsaturated heterocyclic ring having 1-3 heteroatoms independently selected from nitrogen, oxygen, or sulfur, an optionally substituted 7-10 membered bicyclic saturated or partially unsaturated heterocyclic ring having 1-5 heteroatoms independently selected from nitrogen, oxygen, or sulfur, or an 8-10 membered bicyclic heteroaryl ring having 1-5 heteroatoms independently selected from nitrogen, oxygen, or sulfur.

[1104] In preferred embodiments, Ring A is an optionally substituted phenyl group. In some embodiments, Ring A is an optionally substituted naphthyl ring or an optionally substituted bicyclic 8-10 membered heteroaryl ring having 1-4 heteroatoms independently selected from nitrogen, oxygen, or sulfur. In certain other embodiments, Ring A is an optionally substituted 3-7 membered carbocyclic ring. In yet other embodiments, Ring A is an optionally substituted 4-7 membered heterocyclic ring having 1-3 heteroatoms independently selected from nitrogen, oxygen, or sulfur. In preferred embodiments, Ring B is an optionally substituted phenyl group.

[1105] In certain embodiments, Ring A in Formula (15) or Formula (16) is substituted as defined herein. In some embodiments, Ring A is substituted with one, two, or three groups independently selected from halogen, R^{o}, or —(CH₂)₀₋₄OR^{o}, or —O(CH₂)₀₋₄R^{o}, wherein each R^{o} is independently selected from the group consisting of cycloalkyl, alkenyl, cycloalkenyl, alkynyl, aryl, heteroaryl, and heterocyclyl. Exemplary substituents on Ring A include Br, I, Cl, methyl, —CF₃, —C≡CH, —OCH₂phenyl, —OCH₂(fluorophenyl), or —OCH₂pyridyl.

[1106] In a preferred embodiment, the BTK inhibitor is CC-292 (also known as AVL-292), or a pharmaceutically acceptable salt, solvate, hydrate, cocrystal, or prodrug thereof, preferably a hydrochloride salt or a besylate salt thereof. In a preferred embodiment, the BTK inhibitor is a compound of Formula (17):

[chemical structure]

which is N-(3-((5-fluoro-2-((4-(2-methoxyethoxy)phenyl)amino)pyrimidin-4-yl)amino)phenyl)acrylamide, or a pharmaceutically acceptable salt, solvate, hydrate, cocrystal, or prodrug thereof, or in an exemplary embodiment is a hydrochloride salt or a besylate salt thereof. The preparation of this compound is described in U.S. Patent Application Publication No. 2010/0029610 A1 at Example 20, the disclosure of which is incorporated by reference herein. The preparation of the besylate salt of this compound is described in U.S. Patent Application Publication No. 2012/0077832 A1, the disclosure of which is incorporated by reference herein. In an embodiment, the BTK inhibitor is a compound selected from the structures disclosed in U.S. Patent Application Publication No. 2010/0029610 A1 or No. 2012/0077832 A1, the disclosures of which are incorporated by reference herein.

[1107] In a preferred embodiment, the BTK inhibitor is N-(3-((5-fluoro-2-((4-(2-methoxyethoxy)phenyl)amino)pyrimidin-4-yl)amino)phenyl)acrylamide or a pharmaceutically acceptable salt, solvate, hydrate, cocrystal, or prodrug thereof, or a hydrochloride salt thereof. The preparation of this compound is described in U.S. Patent Application Publication Nos. 2010/0029610 A1 and 2012/0077832 A1, the disclosure of which is incorporated by reference herein.

[1108] In a preferred embodiment, the BTK inhibitor is (N-(3-(5-fluoro-2-(4-(2-methoxyethoxy)phenylamino)pyrimidin-4-ylamino)phenyl)acrylamide), or a pharmaceutically acceptable salt, solvate, hydrate, cocrystal, or prodrug thereof, or preferably a besylate salt thereof. The preparation of this compound is described in U.S. Patent Application Publication No. 2010/0029610 A1 at Example 20, the disclosure of which is incorporated by reference herein. The preparation of its besylate salt is described in U.S. Patent Application Publication No. 2012/0077832 A1, the disclosure of which is incorporated by reference herein.

[1109] In an embodiment, the BTK inhibitor is a compound of Formula (18):

[chemical structure]

or a pharmaceutically acceptable salt, hydrate, solvate, cocrystal, or prodrug thereof, wherein
[1110] L represents (1) —O—, (2) —S—, (3) —SO—, (4) —SO₂— (5) —NH—, (6) —C(O)—, (7) —CH₂O—, (8) —O—CH₂—, (9) —CH₂—, or (10) —CH(OH)—;
[1111] R¹ represents (1) a halogen atom, (2) a C₁₋₄ alkyl group, (3) a C₁₋₄ alkoxy group, (4) a C₁₋₄ haloalkyl group, or (5) a C₁₋₄ haloalkoxy group;
[1112] ring1 represents a 4- to 7-membered cyclic group, which may be substituted by from one to five substituents each independently selected from the group consisting of (1) halogen atoms, (2) C₁₋₄ alkyl groups, (3) C₁₋₄ alkoxy groups, (4) nitrile, (5) C₁₋₄ haloalkyl groups, and (6) C₁₋₄ haloalkoxy groups, wherein when two or more substituents are present on ring1, these substituents may form a 4- to 7-membered cyclic group together with the atoms in ring to which these substituents are bound;
[1113] ring2 represents a 4- to 7-membered saturated heterocycle, which may be substituted by from one to three —K—R²; K represents (1) a bond, (2) a C₁₋₄ alkylene, (3) —C(O)—, (4) —C(O)—CH₂—, (5) —CH₂—C(O)—, (6) —C(O)O—, or (7) —SO₂— (wherein the bond on the left is bound to the ring2);
[1114] R² represents (1) a C₁₋₄ alkyl, (2) a C₂₋₄ alkenyl, or (3) a C₂₋₄ alkynyl group, each of which may be substituted by from one to five substituents each independently selected from the group consisting of (1) NR³R⁴, (2) halogen atoms, (3) CONR⁵R⁶, (4) CO₂R⁷, and (5) OR⁸;
[1115] R³ and R⁴ each independently represent (1) a hydrogen atom, or (2) a C₁₋₄ alkyl group which may be substituted by OR⁹ or CONR¹⁰R¹¹; R³ and R⁴ may, together with the nitrogen atom to which they are bound, form a 4- to 7-membered nitrogenous saturated heterocycle, which may be substituted by an oxo group or a hydroxyl group;
[1116] R⁵ and R⁶ each independently represent (1) a hydrogen atom, (2) a C₁₋₄ alkyl group, or (3) a phenyl group;
[1117] R⁷ represents (1) a hydrogen atom or (2) a C₁₋₄ alkyl group;
[1118] R⁸ represents (1) a hydrogen atom, (2) a C₁₋₄ alkyl group, (3) a phenyl group, or (4) a benzotriazolyl group; R⁹ represents (1) a hydrogen atom or (2) a C₁₋₄ alkyl group;
[1119] R¹⁰ and R¹¹ each independently represent (1) a hydrogen atom or (2) a C₁₋₄ alkyl group; n represents an integer from 0 to 4;
[1120] m represents an integer from 0 to 2; and
[1121] when n is two or more, the R¹'s may be the same as each other or may differ from one another).

[1122] In an exemplary embodiment, the BTK inhibitor is a compound of Formula (19):

[chemical structure]

or a pharmaceutically acceptable salt, hydrate, solvate, cocrystal, or prodrug thereof, wherein
[1123] R¹ represents (1) a halogen atom, (2) a C₁₋₄ alkyl group, (3) a C₁₋₄ alkoxy group, (4) a C₁₋₄ haloalkyl group, or (5) a C₁₋₄ haloalkoxy group;
[1124] ring1 represents a benzene, cyclohexane, or pyridine ring, each of which may be substituted by from one to five substituents each independently selected from the group consisting of (1) halogen atoms, (2) C₁₋₄ alkyl groups, (3) C₁₋₄ alkoxy groups, (4) nitrile, (5) CF₃;
[1125] ring2 represents a 4- to 7-membered nitrogenous saturated heterocycle, which may be substituted by from one to three —K—R²; wherein K represents (1) a bond, (2) a C₁₋₄ alkylene, (3) —C(O)—, (4) —C(O)—CH₂—, (5) —CH₂—C(O)—, (6) —C(O)O—, or (7) —SO₂— (wherein the bond on the left is bound to the ring2);
[1126] R² represents (1) a C₁₋₄ alkyl, (2) a C₂₋₄ alkenyl, or (3) a C₂₋₄ alkynyl group, each of which may be substituted by from one to five substituents each independently selected from the group consisting of (1) NR³R⁴, (2) halogen atoms, (3) CONR⁵R⁶, (4) CO₂R⁷, and (5) OR⁸;
[1127] R³ and R⁴ each independently represent (1) a hydrogen atom, or (2) a C₁ alkyl group which may be substituted by OR⁹ or CONR¹⁰R¹¹; R³ and R⁴ may, together with the nitrogen atom to which they are bound, form a 4- to 7-membered nitrogenous saturated heterocycle, which may be substituted by an oxo group or a hydroxyl group;
[1128] R⁵ and R⁶ each independently represent (1) a hydrogen atom, (2) a C₁₋₄ alkyl group, or (3) a phenyl group;
[1129] R⁷ represents (1) a hydrogen atom or (2) a C₁₋₄ alkyl group;
[1130] R⁸ represents (1) a hydrogen atom, (2) a C₁₋₄ alkyl group, (3) a phenyl group, or (4) a benzotriazolyl group; R⁹ represents (1) a hydrogen atom or (2) a C₁₋₄ alkyl group;
[1131] R¹⁰ and R¹¹ each independently represent (1) a hydrogen atom or (2) a C₁₋₄ alkyl group;
[1132] n represents an integer from 0 to 4;
[1133] m represents an integer from 0 to 2; and
[1134] when n is two or more, the R¹'s may be the same as each other or may differ from one another).

[1135] In a preferred embodiment, the BTK inhibitor is a compound of Formula (20):

[chemical structure]

or a pharmaceutically acceptable salt, solvate, hydrate, cocrystal, or prodrug thereof, preferably a hydrochloride salt thereof. The preparation of this compound is described in International Patent Application Publication No. WO 2013/081016 A1 and U.S. Patent Application Publication No. US 2014/0330015 A1, the disclosure of which is incorporated by reference herein. In an embodiment, the BTK inhibitor is 6-amino-9-(1-(but-2-ynoyl)pyrrolidin-3-yl)-7-(4-phenoxyphenyl)-7,9-dihydro-8H-purin-8-one or a pharmaceutically acceptable salt, solvate, hydrate, cocrystal, or prodrug thereof, or preferably a hydrochloride salt thereof. In an embodiment, the BTK inhibitor is 6-amino-9-[(3S)-1-(2-butynoyl)-3-pyrrolidinyl]-7-(4-phenoxyphenyl)-7,9-dihydro-8H-purin-8-one or a pharmaceutically acceptable salt, solvate, hydrate, cocrystal, or prodrug thereof, or a hydrochloride salt thereof.

[1136] The R-enantiomer of Formula (20) is also known as ONO-4059, and is given by Formula (21). In a preferred embodiment, the BTK inhibitor is a compound of Formula (21):

[chemical structure]

or a pharmaceutically acceptable salt, solvate, hydrate, cocrystal, or prodrug thereof, preferably a hydrochloride salt thereof.

[1137] In an embodiment, the BTK inhibitor is 6-amino-9-[(3R)-1-(2-butynoyl)-3-pyrrolidinyl]-7-(4-phenoxyphenyl)-7,9-dihydro-8H-purin-8-one or a pharmaceutically acceptable salt, solvate, hydrate, cocrystal, or prodrug thereof, preferably a hydrochloride salt thereof.

[1138] The preparation of Formula (21) is described in International Patent Application Publication No. WO 2013/081016 A1, the disclosure of which is incorporated by reference herein. In brief, the BTK inhibitor of Formula (21) can be prepared by the following procedure.

[1139] Step 1: A solution of dibenzylamine (10.2 g) in dichloromethane (30 mL) is dripped into a solution of 4,6-dichloro-5-nitropyrimidine (10 g) in dichloromethane (70 mL) on an ice bath. Then triethylamine (14.4 mL) is added, and the mixture is stirred for 1 hour. Water is added to the reaction mixture, the organic layer is washed with a saturated aqueous sodium chloride solution and dried over anhydrous sodium sulfate, and the solvent is concentrated under reduced pressure to obtain N,N-dibenzyl-6-chloro-5-nitropyrimidine-4-amine (19.2 g).

[1140] Step 2: The compound prepared in Step 1 (19 g) and tert-butyl (3R)-3-aminopyrrolidine-1-carboxylate (10.5 g) are dissolved in dioxane (58 mL). Triethylamine (8.1 mL) is added, and the mixture is stirred for 5 hours at 50° C. The reaction mixture is returned to room temperature, the solvent is distilled off, water is added, and extraction is performed with ethyl acetate. The organic layer is washed with saturated aqueous sodium chloride solution, then dried over anhydrous sodium sulfate, and the solvent is distilled off. The residue is purified by silica gel column chromatography to obtain tert-butyl (3R)-3-{[6-(dibenzylamino)-5-nitropyrimidin-4-yl]amino}pyrrolidine-1-carboxylate (27.0 g).

[1141] Step 3: An ethyl acetate (360 mL) solution of the compound prepared in Step 2 (17.5 g) is dripped into a mixture of zinc (23.3 g) and a 3.0 M aqueous ammonium chloride solution (11.4 g) on an ice bath, and the temperature is immediately raised to room temperature. After stirring for 2 hours, the reaction mixture is filtered through CELITE and the solvent is distilled off. The residue is purified by silica gel column chromatography to obtain tert-butyl (3R)-3-{[5-amino-6-(dibenzylamino)pyrimidin-4-yl]amino}pyrrolidine-1-carboxylate (12.4 g).

[1142] Step 4: The compound prepared in Step 3 (8.4 g) and 1,1′-carbonyl diimidazole (5.9 g) are dissolved in tetrahydrofuran (120 mL) and the solution is stirred for 15 hours at 60° C. The solvent is distilled off from the reaction mixture, water is added, and extraction with ethyl acetate is performed. The organic layer is washed with saturated aqueous sodium chloride solution, dried over anhydrous sodium sulfate, and the solvent is distilled off. The residue is purified by silica gel column chromatography to obtain tert-butyl (3R)-3-[6-(dibenzylamino)-8-oxo-7,8-dihydro-9H-purin-9-yl]pyrrolidin-1-carboxylate (7.8 g).

[1143] Step 5: The compound prepared in Step 4 (7.8 g) is dissolved in methanol (240 mL) and ethyl acetate (50 mL), 20% Pearlman's catalyst (Pd(OH)₂/C) (8.0 g, 100 wt %) is added, hydrogen gas replacement is carried out, and stirring is performed for 7.5 hours at 60° C. The reaction mixture is filtered through CELITE and the solvent is distilled off to obtain tert-butyl (3R)-3-(6-amino-8-oxo-7,8-dihydro-9H-purin-9-yl)pyrrolidine-1-carboxylate (5.0 g).

[1144] Step 6: At room temperature p-phenoxy phenyl boronic acid (2.1 g), copper(II) acetate (1.48 g), molecular sieve 4A (2.5 g), and pyridine (0.82 mL) are added to a dichloromethane suspension (200 mL) of the compound prepared in Step 5 (2.5 g), followed by stirring for 21 hours. The reaction mixture is filtered through CELITE and the residue is purified by silica gel column chromatography to obtain tert-butyl (3R)-3-[6-amino-8-oxo-7-(4-phenoxyphenyl)-7,8-dihydro-9H-purin-9-yl]pyrrolidine-1-carboxylate (1.3 g).

[1145] Step 7: At room temperature 4 N HCl/dioxane (13 mL) is added to a methanol (13 mL) suspension of the compound prepared in Step 6 (1.3 g 2.76 mmol, 1.0 equivalent), and the mixture is stirred for 1 hour. The solvent is then distilled off to obtain (3R)-6-amino-9-pyrrolidin-3-yl-7-(4-phenoxyphenyl)-7,9-dihydro-8H-purin-8-one dihydrochloride (1.5 g).

[1146] Step 8: After 2-butylnoic acid (34 mg), 1-ethyl-3-(3-dimethylaminopropyl) carbodiimide hydrochloride (EDC) (78 mg), 1-hydroxybenzotriazole (HOBt) (62 mg), and triethylamine (114 mL) are added to a solution of the compound prepared in Step 7 (100 mg) in dimethyl formamide (3 mL), the mixture is stirred at room temperature for 3 hours. Water is added to the reaction mixture and extraction with ethyl acetate is performed. The organic layer is washed with saturated sodium carbonate solution and saturated aqueous sodium chloride solution, then dried over anhydrous sodium sulfate, and the solvent is distilled off. The residue is purified by thin layer chromatography (dichloromethane:methanol:28% ammonia water=90:10:1) to obtain 6-amino-9-[(3R)-1-(2-butynoyl)-3-pyrrolidinyl]-7-(4-phenoxyphenyl)-7,9-dihydro-8H-purin-8-one (Formula (21)) (75 mg).

[1147] The hydrochloride salt of the compound of Formula (21) can be prepared as follows: 6-amino-9-[(3R)-1-(2-butynoyl)-3-pyrrolidinyl]-7-(4-phenoxyphenyl)-7,9-dihydro-8H-purin-8-one (3.0 g) (which may be prepared as described above) is placed in a 300 mL 3-neck pear-shaped flask, ethyl acetate (30 mL) and 1-propanol (4.5 mL) are added, and the external temperature is set at 70° C. (internal temperature 61° C.). After it is confirmed that the compound prepared in Step 8 has dissolved completely, 10% HCl/methanol (3.5 mL) is added, and after precipitation of crystals is confirmed, the crystals are ripened by the following sequence: external temperature 70° C. for 30 min, external temperature 60° C. for 30 min, external temperature 50° C. for 60 min, external temperature 40° C. for 30 min, room temperature for 30 min, and an ice bath for 30 min. The resulting crystals are filtered, washed with ethyl acetate (6 mL), and dried under vacuum at 50° C. to obtain white crystals of 6-amino-9-[(3R)-1-(2-butynoyl)-3-pyrrolidinyl]-7-(4-phenoxyphenyl)-7,9-dihydro-8H-purin-8-one hydrochloride (2.76 g).

[1148] In an embodiment, the BTK inhibitor is a compound selected from the structures disclosed in U.S. Patent Application Publication No. US 2014/0330015 A1, the disclosure of which is incorporated by reference herein.

[1149] In an embodiment, the BTK inhibitor is a compound of Formula (22):

[chemical structure]

or a pharmaceutically acceptable salt, solvate, hydrate, cocrystal, or prodrug thereof, wherein:
[1150] X—Y—Z is N—C—C and R² is present, or C—N—N and R² is absent;
[1151] R¹ is a 3-8 membered, N-containing ring, wherein the N is unsubstituted or substituted with R⁴;
[1152] R² is H or lower alkyl, particularly methyl, ethyl, propyl or butyl; or
[1153] R¹ and R² together with the atoms to which they are attached, form a 4-8 membered ring, preferably a 5-6 membered ring, selected from cycloalkyl, saturated or unsaturated heterocycle, aryl, and heteroaryl rings unsubstituted or substituted with at least one substituent L-R⁴;
[1154] R³ is in each instance, independently halogen, alkyl, S-alkyl, CN, or OR⁵;
[1155] n is 1, 2, 3, or 4, preferably 1 or 2; L is a bond, NH, heteroalkyl, or heterocyclyl;
[1156] R⁴ is COR′, CO₂R′, or SO₂R′, wherein R′ is substituted or unsubstituted alkyl, substituted or unsubstituted alkenyl, substituted or unsubstituted alkynyl;
[1157] R⁵ is H or unsubstituted or substituted heteroalkyl, alkyl, cycloalkyl, saturated or unsaturated heterocyclyl, aryl, or heteroaryl.

[1158] In some embodiments, the BTK inhibitor is one of the following particular embodiments of Formula (22):
[1159] X—Y—Z is C—N—N and R² is absent; and R¹ is 3-8 membered, N-containing ring, N-substituted with R⁴;
[1160] X—Y—Z is N—C—C and R² is present, R¹ is 3-8 membered, N-containing ring, N-substituted with R⁴; and R² is H or lower alkyl;
[1161] X—Y—Z is N—C—C and R² is present; and R¹ and R² together with the atoms to which they are attached, form a 4-8 membered ring selected from cycloalkyl, saturated or unsaturated heterocycle, aryl, and heteroaryl rings unsubstituted or substituted with at least one substituent L-R⁴, wherein preferred rings of R¹ and R² are 5-6-membered, particularly dihydropyrrole, tetrahydropyridine, tetrahydroazepine, phenyl, or pyridine;
[1162] X—Y—Z is N—C—C and R² is present; and R¹ and R² together with the atoms to which they are attached, form a 5-6 membered ring, preferably (a) phenyl substituted with a single -L-R⁴, or (b) dihydropyrrole or tetrahydropyridine, N-substituted with a single -L-R⁴ wherein L is bond;
[1163] R¹ is piperidine or azaspiro[3.3]heptane, preferably N-substituted with R⁴;
[1164] R⁴ is COR′ or SO₂R′, particularly wherein R′ is substituted or unsubstituted alkenyl, particularly substituted or unsubstituted ethenyl; or
[1165] R⁵ is unsubstituted or substituted alkyl or aryl, particularly substituted or unsubstituted phenyl or methyl, such as cyclopropyl-substituted methyl with or tetrabutyl-substituted phenyl.

[1166] In some embodiments, the BTK inhibitor is one of the following particular embodiments of Formula (22):
[1167] R¹ is piperidine or azaspiro[3.3]heptane, N-substituted with R⁴, wherein R⁴ is H, COR′ or SO₂R′, and R′ is substituted or unsubstituted alkenyl, particularly substituted or unsubstituted ethenyl;
[1168] R³ is —OR⁵, R⁵ is phenyl, and n is 1;
[1169] R¹ and R², together with the atoms to which they are attached, form a 5-6 membered ring, preferably (a) phenyl substituted with a single -L-R⁴, or (b) dihydropyrrole or tetrahydropyridine, N-substituted with a single -L-R⁴ wherein L is bond; R³ is —OR; n is 1; R⁴ is COR′, and R′ is ethenyl; and R⁵ is phenyl; and
[1170] X—Y—Z is C—N—N and R² is absent; R′ is piperidine, N-substituted with R⁴; R³ is —OR; n is 1; R⁴ is COR′, and R′ is unsubstituted or substituted alkenyl, particularly ethenyl; and R⁵ is substituted or unsubstituted aryl, particularly phenyl.

[1171] In some embodiments, the BTK inhibitor is a compound selected from the group consisting of Formula (23), Formula (24), or Formula (25):

[chemical structure]

or a pharmaceutically acceptable salt, solvate, hydrate, cocrystal, or prodrug thereof. Formula (24) is also known as BGB-3111. The preparation of these compounds is described in International Patent Application Publication No. WO 2014/173289 A1 and U.S. Patent Application Publication No. US 2015/0005277 A1, the disclosure of which is incorporated by reference herein.

[1172] In brief, the BTK inhibitor of Formula (23) can be prepared by the following procedure.

[1173] Step 1. Preparation of 2-(hydroxy(4-phenoxyphenyl)methylene)malononitrile:

[chemical structure]

[1174] A solution of 4-phenoxybenzoic acid (300 g, 1.4 mol) in SOCl₂ (1.2 L) is stirred at 80° C. under N₂ for 3 hours. The mixture is concentrated in vacuum to give the intermediate (315 g) which is used for next step without further purification.

[1175] To a solution of propanedinitrile (89.5 g, 1355 mmol) and N,N-diisopropylethylamine (DIEA) (350 g, 2710 mmol) in THF (800 mL) is added dropwise a solution of the intermediate (315 g) in toluene (800 mL) at 0-5° C. over 2 hours. The resultant mixture is allowed to warm to RT and stirred for 16 hours. The reaction is quenched with water (2.0 L) and extracted with of EA (2.0 L×3). The combined organic layers are washed with 1000 mL of 3 N HCl aqueous solution, brine (2.0 L×3), dried over Na₂SO₄ and concentrated to give the crude product (330 g, 93%).

[1176] Step 2. Preparation of 2-(methoxy(4-phenoxyphenyl)methylene)malononitrile:

[chemical structure]

[1177] A solution of 2-(hydroxy(4-phenoxyphenyl)methylene)malononitrile (50 g, 190.8 mmol) in CH(OMe₃) (500 mL) is heated to 75° C. for 16 hours. Then the mixture is concentrated to a residue and washed with MeOH (50 mL) to give 25 g (47.5%) of 2-(methoxy(4-phenoxyphenyl)methylene)malononitrile as a yellow solid.

[1178] Step 3. Preparation of 5-amino-3-(4-phenoxyphenyl)-1H-pyrazole-4-carbonitrile:

[chemical structure]

[1179] To a solution of 2-(methoxy(4-phenoxyphenyl)methylene)malononitrile (80 g, 290 mmol) in ethanol (200 mL) is added hydrazine hydrate (20 mL). The mixture is stirred at RT for 16 hours then is concentrated to give the crude product and washed with MeOH (30 mL) to afford 55 g (68.8%) of 5-amino-3-(4-phenoxyphenyl)-1H-pyrazole-4-carbonitrile as an off-white solid.

[1180] Step 4. Preparation of tert-butyl 3-(tosyloxy)piperidine-1-carboxylate:

[chemical structure]

wherein “Boc” represents a tert-butyloxycarbonyl protecting group.

[1181] To a solution of tert-butyl 3-hydroxypiperidine-1-carboxylate (1.05 g, 5.0 mmol) in pyridine (8 mL) is added TsCl (1.425 g, 7.5 mmol). The mixture is stirred at RT under N₂ for two days. The mixture is concentrated and partitioned between 100 mL of EA and 100 mL of HCl (1 N) aqueous solution. The organic layer is separated from aqueous layer, washed with saturated NaHCO₃ aqueous solution (100 mL×2), brine (100 mL×3) and dried over Na₂SO₄. The organic layer is concentrated to afford 1.1 g (60%) of tert-butyl 3-(tosyloxy)piperidine-1-carboxylate as a colorless oil.

[1182] Step 5. Preparation of tert-butyl 3-(5-amino-4-cyano-3-(4-phenoxyphenyl)-1H-pyrazol-1-yl)piperidine-1-carboxylate:

[chemical structure]

[1183] To a solution of tert-butyl 3-(tosyloxy)piperidine-1-carboxylate (355 mg, 1.0 mmol) and 5-amino-3-(4-phenoxyphenyl)-1H-pyrazole-4-carbonitrile (276 mg, 1.0 mmol) in 5 mL of DMF is added Cs₂CO₃ (650 mg, 2.0 mmol). A tosyloxy leaving group is employed in this reaction. The mixture is stirred at RT for 16 hours, 75° C. for 3 hours and 60° C. for 16 hours. The mixture is concentrated washed with brine (100 mL×3) and dried over Na₂SO₄. The material is concentrated and purified by chromatography column on silica gel (eluted with petroleum ether/ethyl acetate=3/1) to afford 60 mg (13%) of tert-butyl 3-(5-amino-4-cyano-3-(4-phenoxyphenyl)-1H-pyrazol-1-yl)piperidine-1-carboxylate as a yellow oil.

[1184] Step 6. Preparation of tert-butyl 3-(5-amino-4-carbamoyl-3-(4-phenoxyphenyl)-1H-pyrazol-1-yl)piperidine-1-carboxylate:

[chemical structure]

[1185] To a solution of tert-butyl 3-(5-amino-4-cyano-3-(4-phenoxyphenyl)-1H-pyrazol-1-yl)piperidine-1-carboxylate (100 mg, 0.22 mmol) in DMSO (2 mL) and ethanol (2 mL) was added the solution of NaOH (200 mg, 5 mmol) in water (1 mL) and H₂O₂ (1 mL). The mixture is stirred at 60° C. for 15 min and concentrated to remove EtOH, after which 10 mL of water and 50 mL of ethyl acetate are added. The organic layer is separated from aqueous layer, washed with brine (30 mL×3) and dried over Na₂SO₄. After concentration, 50 mg of residue is used directly in the next step, wherein 50 mg of residue is purified by pre-TLC (eluted with petroleum ether/ethyl acetate=1/1) to afford 12 mg (30%) of tert-butyl 3-(5-amino-4-carbamoyl-3-(4-phenoxyphenyl)-1H-pyrazol-1-yl)piperidine-1-carboxylate as a white solid.

[1186] Step 7. Preparation of 5-amino-3-(4-phenoxyphenyl)-1-(piperidin-3-yl)-1H-pyrazole-4-carboxamide:

[chemical structure]

[1187] To a solution of tert-butyl 3-(5-amino-4-carbamoyl-3-(4-phenoxyphenyl)-1H-pyrazol-1-yl)piperidine-1-carboxylate (50 mg, 0.11 mmol) in ethyl acetate (1 mL) is added concentrated HCl (0.75 mL). The mixture is stirred at RT for 1 hour. Then saturated NaHCO₃ is added until pH>7, followed by ethyl acetate (50 mL). The organic layer is separated from aqueous layer, washed with brine (50 mL×3) and dried over Na₂SO₄. The resulting product is concentrated and purified by Pre-TLC (eluted with dichloromethane/MeOH/NH₃—H₂O=5/1/0.01) to afford 10 mg (25%) of 5-amino-3-(4-phenoxyphenyl)-1-(piperidin-3-yl)-1H-pyrazole-4-carboxamide as a white solid.

[1188] Step 8. Preparation of 1-(1-acryloylpiperidin-3-yl)-5-amino-3-(4-phenoxyphenyl)-1H-pyrazole-4-carboxamide:

[chemical structure]

[1189] To a solution of 5-amino-3-(4-phenoxyphenyl)-1-(piperidin-3-yl)-1H-pyrazole-4-carboxamide (63 mg, 0.17 mmol) in dichloromethane (4 mL) is added pyridine (27 mg, 0.34 mmol). Then a solution of acryloyl chloride (12 mg, 0.17 mmol) in dichloromethane (1 mL) is added dropwise. After stirring at RT for 4 hours, the mixture is partitioned between 100 mL of dichloromethane and 100 mL of brine. The organic layer is separated from aqueous layer, washed with brine (100 mL×2) and dried over Na₂SO₄. The material is concentrated and purified by Pre-TLC (eluted with dichloromethane/MeOH=10/1) to afford 4 mg (5.5%) of 1-(1-acryloylpiperidin-3-yl)-5-amino-3-(4-phenoxyphenyl)-1H-pyrazole-4-carboxamide as a white solid.

[1190] The enantiomers of Formula (23) provided by the procedure above may be prepared from 5-amino-3-(phenoxyphenyl)-1H-pyrazole-4-carbonitrile and (S)-tert-butyl 3-hydroxypiperidine-1-carboxylate using a similar procedure (step 4 to 8) for Formula (24), or from (R)-tert-butyl 3-hydroxypiperidine-1-carboxylate using a similar procedure (step 4 to 8) for Formula (25). Under appropriate conditions recognized by one of ordinary skill in the art, a racemic mixture of Formula (23) may be separated by chiral HPLC, the crystallization of chiral salts, or other means described above to yield Formula (24) and Formula (25) of high enantiomeric purity.

[1191] In an embodiment, the BTK inhibitor is a compound selected from the structures disclosed in U.S. Patent Application Publication No. US 2015/0005277A1, the disclosure of which is incorporated by reference herein.

[1192] Other BTK inhibitors suitable for use in the described combination with a GITR binding molecule include, but are not limited to, those described in International Patent Application Publication Nos. WO 2013/010868, WO 2012/158843, WO 2012/135944, WO 2012/135937, U.S. Patent Application Publication No. 2011/0177011, and U.S. Pat. Nos. 8,501,751, 8,476,284, 8,008,309, 7,960,396, 7,825,118, 7,732,454, 7,514,444, 7,459,554, 7,405,295, and 7,393,848, the disclosures of each of which are incorporated herein by reference.

### GITR Binding Molecules

[1193] The GITR binding molecule may be any GITR binding molecule inhibitor known in the art. The GITR binding molecule may be a monoclonal antibody or fusion protein capable of binding to GITR. In particular, it is one of the GITR binding molecules described in more detail in the following paragraphs. In preferred embodiments, the compositions described herein provide a combination of a GITR binding molecule with a BTK inhibitor, or methods of using a combination of a GITR binding molecule with a BTK inhibitor.

[1194] The GITR binding molecules may comprise an immunoglobulin heavy chain of any isotype (e.g., IgG, IgE, IgM, IgD, IgA, and IgY), class (e.g., IgG1, IgG2, IgG3, IgG4, IgA1 and IgA2) or subclass of immunoglobulin molecule. The GITR binding molecules may have both a heavy and a light chain. As used herein, the term binding molecule also includes antibodies (including full length antibodies), monoclonal antibodies (including full length monoclonal antibodies), polyclonal antibodies, multispecific antibodies (e.g., bispecific antibodies), human, humanized or chimeric antibodies, and antibody fragments, e.g., Fab fragments, F(ab′) fragments, fragments produced by a Fab expression library, epitope-binding fragments of any of the above, and engineered forms of antibodies, e.g., scFv molecules, that bind to GITR. The GITR binding molecules may also be a fusion protein.

[1195] In some embodiments, the anti-GITR antibodies are characterized by binding to hGITR (SEQ ID NO: 1) with high affinity, in the presence of a stimulating agent, e.g., CD3, and are agonistic, and abrogate the suppression of T effector cells by Treg cells. In an embodiment, the GITR binding molecule binds to human GITR (SEQ ID NO: 1). In an embodiment, the GITR binding molecule binds to murine GITR (SEQ ID NO:2). The amino acid sequences of GITR antigens to which a GITR binding molecule binds are summarized in Table 1.

TABLE 1
Amino acid sequences of GITR antigens.

| Identifier | Sequence (One-Letter Amino Acid Symbols) | |
|---|---|---|
| SEQ ID NO: 1 | MAQHGAMGAF RALCGLALLC ALSLGQRPTG GPGCGPGRLL LGTGTDARCC RVHTTRCCRD | 60 |
| human GITR, | YPGEECCSEW DCMCVQPEFH CGDPCCTTCR HHPCPPGQGV QSQGKFSFGF QCIDCASGTF | 120 |
| tumor necrosis | SGGHEGHCKP WTDCTQFGFL TVFPGNKTHN AVCVPGSPPA EPLGWLTVVL LAVAACVLLL | 180 |
| factor receptor | TSAQLGLHIW QLRSQCMWPR ETQLLLEVPP STEDARSCQF PEEERGERSA EEKGRLGDLW | 240 |
| superfamfly | V | 241 |
| member 18 (Homo | | |
| sapiens) | | |
| SEQ ID NO: 2 | MGAWAMLYGV SMLCVLDLGQ PSVVEEPGCG PGKVQNGSGN NTRCCSLYAP GKEDCPKERC | 60 |
| murine GITR, | ICVTPEYHCG DPQCKICKHY PCQPGQRVES QGDIVFGFRC VACAMGTFSA GRDGHCRLWT | 120 |
| tumor necrosis | NCSQFGFLTM FPGNKTHNAV CIPEPLPTEQ YGHLTVIFLV MAACIFFLTT VQLGLHIWQL | 180 |
| factor receptor | RRQHMCPRET QPFAEVQLSA EDACSFQFPE EERGEQTEEK CHLGGRWP | 228 |
| superfamily | | |
| member 18 (Mus | | |
| musculus) | | |

[1196] In an embodiment, the GITR binding molecule is an antigen binding protein that is a fully human antibody. In an embodiment, the GITR binding molecule is an antigen binding protein that is a humanized antibody. In an embodiment, the GITR binding molecule is an antigen binding protein that agonizes the activity of human GITR In an embodiment, the GITR binding molecule is an antigen binding protein that is a fully human IgG1 antibody. In an embodiment, the GITR binding molecule is an antigen binding protein that is capable of binding Fcgamma receptor (FcγR). In an embodiment, the GITR binding molecule is an antigen binding protein that is capable of binding Fcgamma receptor (FcγR) such that a cluster of antigen binding proteins is formed.

[1197] In some embodiments, the compositions and methods described include a GITR binding molecule that binds human or murine GITR with a K_{D} of about 100 pM or lower, binds human or murine GITR with a K_{D} of about 90 pM or lower, binds human or murine GITR with a K_{D} of about 80 pM or lower, binds human or murine GITR with a K_{D} of about 70 pM or lower, binds human or murine GITR with a K_{D} of about 60 pM or lower, binds human or murine GITR with a K_{D} of about 50 pM or lower, binds human or murine GITR with a K_{D} of about 40 pM or lower, or binds human or murine GITR with a K_{D} of about 30 pM or lower.

[1198] In some embodiments, the compositions and methods described include a GITR binding molecule that binds to human or murine GITR with a k_{assoc} of about 7.5×10⁵ l/M·s or faster, binds to human or murine GITR with a k_{assoc} of about 7.5×10⁵ l/M·s or faster, binds to human or murine GITR with a k_{assoc} of about 8×10⁵ l/M·s or faster, binds to human or murine GITR with k_{assoc} of about 8.5×10⁵ l/M·s or faster, binds to human or murine GITR with a k_{assoc} of about 9×10⁵ l/M·s or faster, binds to human or murine GITR with a k_{assoc} of about 9.5×10⁵ l/M·s or faster, or binds to human or murine GITR with a k_{assoc} of about 1×10⁶ l/M·s or faster.

[1199] In some embodiments, the compositions and methods described include a GITR binding molecule that binds to human or murine GITR with a k_{dissoc} is of about 2×10⁻⁵ l/s or slower, binds to human or murine GITR with a k_{dissoc} of about 2.1×10⁻⁵ l/s or slower, binds to human or murine GITR with a k_{dissoc} of about 2.2×10⁻⁵ l/s or slower, binds to human or murine GITR with a k_{dissoc} of about 2.3×10⁻⁵ l/s or slower, binds to human or murine GITR with a k_{dissoc} of about 2.4×10⁻⁵ l/s or slower, binds to human or murine GITR with a k_{dissoc} of about 2.5×10⁻⁵ l/s or slower, binds to human or murine GITR with a k_{dissoc} of about 2.6×10⁻⁵ l/s or slower or binds to human or murine GITR with a k_{dissoc} of about 2.7×10⁻⁵ l/s or slower, binds to human or murine GITR with a k_{dissoc} of about 2.8×10⁻⁵ l/s or slower, binds to human or murine GITR with a k_{dissoc} of about 2.9×10⁻⁵ l/s or slower, or binds to human or murine GITR with a k_{dissoc} of about 3×10⁻⁵ l/s or slower.

[1200] In some embodiments, the compositions and methods described include a GITR binding molecule that binds to human or murine GITR with an IC₅₀ of about 10 nM or lower, binds to human or murine GITR with an IC₅₀ of about 9 nM or lower, binds to human or murine GITR with an IC₅₀ of about 8 nM or lower, binds to human or murine GITR with an IC₅₀ of about 7 nM or lower, binds to human or murine GITR with an IC₅₀ of about 6 nM or lower, binds to human or murine GITR with an IC₅₀ of about 5 nM or lower, binds to human or murine GITR with an IC₅₀ of about 4 nM or lower, binds to human or murine GITR with an IC₅₀ of about 3 nM or lower, binds to human or murine GITR with an IC₅₀ of about 2 nM or lower, or binds to human or murine GITR with an IC₅₀ of about 1 nM or lower.

[1201] In a preferred embodiment, the GITR binding molecule is an agonistic, anti-GITR monoclonal antibody (i.e., an antibody derived from a single cell line). Agonist anti-GITR antibodies are known to induce strong immune responses. Cohen, et al., Cancer Res. 2006, 66, 4904-12; Schaer, et al., Curr. Opin. Investig. Drugs 2010, 11, 1378-1386. In a preferred embodiment, the GITR binding molecule is a monoclonal antibody that binds specifically to GITR antigen. In an embodiment, the GITR binding molecule is a GITR receptor blocker. In some embodiments, the GITR binding molecule is an agonistic, anti-GITR monoclonal antibody that abrogates antibody-dependent cellular toxicity (ADCC), for example NK cell cytotoxicity. In some embodiments, the GITR binding molecule is an agonistic, anti-GITR monoclonal antibody that abrogates antibody-dependent cell phagocytosis (ADCP). In some embodiments, the GITR binding molecule is an agonistic, anti-GITR monoclonal antibody that abrogates complement-dependent cytotoxicity (CDC).

[1202] In an embodiment, the GITR binding molecule is the agonistic, anti-GITR monoclonal antibody TRX518 (TolerRx, Inc.). TRX518 is a fully humanized IgG1 anti-human GITR monoclonal antibody, was constructed, wherein heavy chain asparagine 297 is substituted with alanine to eliminate N-linked glycosylation, which abrogates Fc region functionality, including ADCC and CDC. Rosenzweig, et al., J. Clin. Oncol. 2010, 28 (supplement; abstract e13028); Jung, et al., Cur. Opin. Biotechnology 2011, 22,858-867. In some embodiments, the GITR binding molecule is the anti-human-GITR monoclonal antibody 6C8, or a variant thereof. The 6C8 antibody is an anti-GITR antibody that binds to human GITR on immune cells, e.g., human T cells and dendritic cells, with high affinity. Preferably, such binding molecules abrogate the suppression of T effector cells by Treg cells and are agonistic to partially activated immune cells in vitro in the presence of a stimulating agent, such as CD3. In some embodiments, the GITR binding molecule is the anti-murine GITR monoclonal antibody 2F8, or a variant thereof. The preparation, properties, and uses of 6C8 and 2F8 antibodies, and their variants, are described in U.S. Pat. Nos. 7,812,135; 8,388,967; and 9,028,823; the disclosures of which are incorporated by reference herein.

[1203] In an embodiment, the agonistic anti-GITR monoclonal antibody is a humanized 6C8 monoclonal antibody (such as TRX518), or an antigen-binding fragment, derivative, conjugate, variant, or radioisotope-labeled complex thereof. In an embodiment, the agonistic anti-GITR monoclonal antibody comprises a heavy chain selected from the group consisting of SEQ ID NO:3, SEQ ID NO:4, SEQ ID NO:5 and SEQ ID NO:6, and a light chain comprising SEQ ID NO:7. In an embodiment, the agonistic anti-GITR monoclonal antibody comprises a heavy chain with a sequence identity of greater than 99% to a sequence selected from the group consisting of SEQ ID NO:3, SEQ ID NO:4, SEQ ID NO:5 and SEQ ID NO:6, and a light chain with a sequence identity of greater than 99% to SEQ ID NO:7. In an embodiment, the agonistic anti-GITR monoclonal antibody comprises a heavy chain with a sequence identity of greater than 98% to a sequence selected from the group consisting of SEQ ID NO:3, SEQ ID NO:4, SEQ ID NO:5 and SEQ ID NO:6, and a light chain with a sequence identity of greater than 98% to SEQ ID NO:7. In an embodiment, the agonistic anti-GITR monoclonal antibody comprises a heavy chain with a sequence identity of greater than 95% to a sequence selected from the group consisting of SEQ ID NO:3, SEQ ID NO:4, SEQ ID NO:5 and SEQ ID NO:6, and a light chain with a sequence identity of greater than 95% to SEQ ID NO:7. In an embodiment, the agonistic anti-GITR monoclonal antibody comprises a heavy chain with a sequence identity of greater than 90% to a sequence selected from the group consisting of SEQ ID NO:3, SEQ ID NO:4, SEQ ID NO:5 and SEQ ID NO:6, and a light chain with a sequence identity of greater than 90% to SEQ ID NO:7.

[1204] In an embodiment, the agonistic anti-GITR monoclonal antibody comprises a heavy chain that comprises the leader sequence of SEQ ID NO:8 and further comprises a sequence selected from the group consisting of SEQ ID NO:3, SEQ ID NO:4, SEQ ID NO:5 and SEQ ID NO:6. In an embodiment, the agonistic anti-GITR monoclonal antibody comprises a light chain that comprises the leader sequence of SEQ ID NO:9 and further comprises a sequence comprising SEQ ID NO:7.

[1205] In an embodiment, the agonistic anti-GITR monoclonal antibody (such as TRX518) comprises a variable heavy chain region (V_{H}) selected from the group consisting of SEQ ID NO: 10 and SEQ ID NO: 11, and a variable light chain region (V_{L}) comprising SEQ ID NO: 12. In an embodiment, the agonistic anti-GITR monoclonal antibody comprises a variable heavy chain region selected from the group consisting of amino acid residues 20-138 of SEQ ID NO:10 and amino acid residues 20-138 of SEQ ID NO: 11, and a variable light chain region comprising amino acid residues 20-138 of SEQ ID NO:12. In an embodiment, the agonistic anti-GITR monoclonal antibody comprises a variable heavy chain region with a sequence identity of greater than 99% to a sequence selected from the group consisting of amino acid residues 20-138 of SEQ ID NO: 10 and amino acid residues 20-138 of SEQ ID NO: 11, and a variable light chain region with a sequence identity of greater than 99% to a sequence comprising amino acid residues 20-138 of SEQ ID NO: 12. In an embodiment, the agonistic anti-GITR monoclonal antibody comprises a variable heavy chain region with a sequence identity of greater than 98% to a sequence selected from the group consisting of amino acid residues 20-138 of SEQ ID NO: 10 and amino acid residues 20-138 of SEQ ID NO: 11, and a variable light chain region with a sequence identity of greater than 98% to a sequence comprising amino acid residues 20-138 of SEQ ID NO: 12. In an embodiment, the agonistic anti-GITR monoclonal antibody comprises a variable heavy chain region with a sequence identity of greater than 95% to a sequence selected from the group consisting of amino acid residues 20-138 of SEQ ID NO: 10 and amino acid residues 20-138 of SEQ ID NO: 11, and a variable light chain region with a sequence identity of greater than 95% to a sequence comprising amino acid residues 20-138 of SEQ ID NO: 12. In an embodiment, the agonistic anti-GITR monoclonal antibody comprises a variable heavy chain region with a sequence identity of greater than 90% to a sequence selected from the group consisting of amino acid residues 20-138 of SEQ ID NO:10 and amino acid residues 20-138 of SEQ ID NO: 11, and a variable light chain region with a sequence identity of greater than 90% to a sequence comprising amino acid residues 20-138 of SEQ ID NO:12.

[1206] In an embodiment, the agonistic anti-GITR monoclonal antibody comprises a V_{H} region comprising at least one CDR1 region comprising the amino acid sequence of SEQ ID NO: 13; at least one CDR2 region comprising an amino acid sequence selected from the group consisting of SEQ ID NO: 14 and SEQ ID NO: 15; and at least one CDR3 region comprising the amino acid sequence of SEQ ID NO: 16; and a V_{L} region comprising at least one CDR1 region comprising the amino acid sequence of SEQ ID NO: 17; at least one CDR2 region comprising the amino acid sequence of SEQ ID NO: 18; and at least one CDR3 region comprising the amino acid sequence of SEQ ID NO: 19. In an embodiment, the invention provides isolated nucleic acid molecules encoding a polypeptide sequence comprising a 6C8 CDR, e. g., comprising an amino acid sequence selected from the group consisting of: SEQ ID NO: 13, SEQ ID NO: 14, SEQ ID NO:15, SEQ ID NO:16, SEQ ID NO:17, SEQ ID NO:18, and SEQ ID NO:19. In an embodiment, the agonistic anti-GITR monoclonal antibody comprises the six CDRs represented by the amino acid sequences of SEQ ID NO: 13, SEQ ID NO: 15, SEQ ID NO: 16, SEQ ID NO:17, SEQ ID NO:18, and SEQ ID NO: 19. In an embodiment, the GITR binding molecule that specifically binds to GITR comprises the six CDRs represented by the amino acid sequences of SEQ ID NO:13, SEQ ID NO:14, SEQ ID NO:16, SEQ ID NO:17, SEQ ID NO:18, and SEQ ID NO: 19. In an embodiment, the agonistic anti-GITR monoclonal antibody comprises a V_{L} having at least one CDR domain comprising an amino acid sequence selected from the group consisting of SEQ ID NO: 17, SEQ ID NO: 18, and SEQ ID NO: 19. In an embodiment, the agonistic anti-GITR monoclonal antibody comprises a V_{L} having at least two CDR domains comprising an amino acid sequence selected from the group consisting of SEQ ID NO: 17, SEQ ID NO: 18, and SEQ ID NO: 19. In an embodiment, the agonistic anti-GITR monoclonal antibody comprises a V_{L} having CDR domains comprising the amino acid sequences of SEQ ID NO: 17, SEQ ID NO: 18, and SEQ ID NO: 19. In an embodiment, the agonistic anti-GITR monoclonal antibody comprises a V_{L} having at least one CDR domain comprising an amino acid sequence selected from the group consisting of SEQ ID NO: 13, SEQ ID NO: 14, and SEQ ID NO: 16. In an embodiment, the agonistic anti-GITR monoclonal antibody comprises a V_{L} having at least two CDR domains comprising an amino acid sequence selected from the group consisting of SEQ ID NO:13, SEQ ID NO:14, and SEQ ID NO:16. In an embodiment, the agonistic anti-GITR monoclonal antibody comprises a V_{L} having CDR domains comprising the amino acid sequences of SEQ ID NO:13, SEQ ID NO:14, and SEQ ID NO:16. In an embodiment, the agonistic anti-GITR monoclonal antibody comprises a V_{L} having at least one CDR domain comprising an amino acid sequence selected from the group consisting of SEQ ID NO: 13, SEQ ID NO:15, and SEQ ID NO: 16. In an embodiment, the agonistic anti-GITR monoclonal antibody comprises a V_{L} having at least two CDR domains comprising an amino acid sequence selected from the group consisting of SEQ ID NO:13, SEQ ID NO:15, and SEQ ID NO: 16. In an embodiment, the agonistic anti-GITR monoclonal antibody comprises a V_{L} having CDR domains comprising the amino acid sequences of SEQ ID NO:13, SEQ ID NO:15, and SEQ ID NO:16. In an embodiment, the agonistic anti-GITR monoclonal antibody comprises a V_{H} domain comprising a CDR set forth in SEQ ID NO:13 (CDR1). In an embodiment, the agonistic anti-GITR monoclonal antibody comprises a V_{H} domain comprising a CDR set forth in SEQ ID NO: 14 (CDR2, “N” variant). In an embodiment, the agonistic anti-GITR monoclonal antibody comprises a V_{H} domain comprising a CDR set forth in SEQ ID NO: 15 (CDR3, “Q” variant). In an embodiment, the agonistic anti-GITR monoclonal antibody comprises a V_{H} domain comprising a CDR set forth in SEQ ID NO: 16 (CDR3). In an embodiment, the agonistic anti-GITR monoclonal antibody comprises a V_{L} domain comprising a CDR set forth in SEQ ID NO: 17 (CDR1). In an embodiment, the agonistic anti-GITR monoclonal antibody comprises a V_{L} domain comprising a CDR set forth in SEQ ID NO:18 (CDR2). In an embodiment, the agonistic anti-GITR monoclonal antibody comprises a V_{L} domain comprising a CDR set forth in SEQ ID NO:19 (CDR3).

[1207] In an embodiment, the agonistic anti-GITR monoclonal antibody comprises a light chain and a heavy chain, or an antigen-binding fragment thereof, which antibody or antigen-binding fragment specifically binds GITR, wherein said antibody or antigen-binding fragment thereof comprises (a) the heavy chain complementarity determining region (CDR) amino acid sequences in SEQ ID NO:10 and (b) the light chain CDR amino acid sequences in SEQ ID NO: 12. In an embodiment, the agonistic anti-GITR monoclonal antibody comprises a light chain and a heavy chain, or an antigen-binding fragment thereof, which antibody or antigen-binding fragment specifically binds GITR, wherein said antibody or antigen-binding fragment thereof comprises (a) the heavy chain complementarity determining region (CDR) amino acid sequences in SEQ ID NO: 10 and (b) the light chain CDR amino acid sequences in SEQ ID NO: 12. In an embodiment, the agonistic anti-GITR monoclonal antibody comprises a light chain and a heavy chain, or an antigen-binding fragment thereof, which antibody or antigen-binding fragment specifically binds GITR, wherein said antibody or antigen-binding fragment thereof comprises the light chain complementarity determining region (CDR) amino acid sequences shown in amino acid residues 44-54 of SEQ ID NO: 12, amino acid residues 70-76 of SEQ ID NO:12, and amino acid residues 109-117 of SEQ ID NO:2, and heavy chain CDR amino acid sequences shown in amino acid residues 45-56 of SEQ ID NO: 10, amino acid residues 119-127 of SEQ ID NO: 10, and one of amino acid residues 71-86 of SEQ ID NO: 10 and amino acid residues 71-86 of SEQ ID NO: 11.

[1208] In an embodiment, the agonistic anti-GITR monoclonal antibody is a chimeric 6C8 monoclonal antibody, or an antigen-binding fragment, derivative, conjugate, or variant thereof. In an embodiment, the agonistic anti-GITR monoclonal antibody comprises a heavy chain selected from the group consisting of SEQ ID NO:21 and SEQ ID NO:22, and a light chain comprising SEQ ID NO:20. In an embodiment, the agonistic anti-GITR monoclonal antibody comprises a heavy chain with a sequence identity of greater than 99% to a sequence selected from the group consisting of SEQ ID NO:21 and SEQ ID NO:22, and a light chain with a sequence identity of greater than 99% to SEQ ID NO:20. In an embodiment, the agonistic anti-GITR monoclonal antibody comprises a heavy chain with a sequence identity of greater than 98% to a sequence selected from the group consisting of SEQ ID NO:21 and SEQ ID NO:22, and a light chain with a sequence identity of greater than 98% to SEQ ID NO:20. In an embodiment, the agonistic anti-GITR monoclonal antibody comprises a heavy chain with a sequence identity of greater than 95% to a sequence selected from the group consisting of SEQ ID NO:21 and SEQ ID NO:22, and a light chain with a sequence identity of greater than 95% to SEQ ID NO:20. In an embodiment, the agonistic anti-GITR monoclonal antibody comprises a heavy chain with a sequence identity of greater than 90% to a sequence selected from the group consisting of SEQ ID NO:21 and SEQ ID NO:22, and a light chain with a sequence identity of greater than 90% to SEQ ID NO:20.

[1209] In an embodiment, the GITR binding molecule is an agonistic, anti-GITR monoclonal antibody with a structure and preparation described in U.S. Pat. No. 8,709,424; U.S. Patent Application Publication Nos. US 2012/0189639 A1 and US 2014/0348841 A1, and International Patent Application Publication No. WO 2011/028683 A1 (Merck Sharp & Dohme Corp.), the disclosures of which are incorporated by reference herein. These GITR binding molecules include monoclonal antibodies and variants and fragments thereof, including humanized and chimeric recombinant antibodies, that bind human GITR, comprising an antibody light chain variable domain having one, two, or three CDRs selected from the group consisting of SEQ ID NO: 100 to SEQ ID NO: 132 and a heavy chain variable domain having one, two, or three CDRs selected from the group consisting of SEQ ID NO:67 to SEQ ID NO:99. In an embodiment, the GITR binding molecule is an agonistic, anti-GITR monoclonal antibody selected from the group consisting of 36E5, 3D6, 61G6, 6H6, 61F6, 1D8, 17F10, 35D8, 49A1, 9E5, and 31H6.

[1210] In some embodiments, the agonistic, anti-GITR monoclonal antibody comprises a light chain variable domain (V_{L}) comprising a sequence selected from the group consisting of SEQ ID NO:34 to SEQ ID NO:44, or a variant or fragment thereof, and a heavy chain variable domain (V_{H}) comprising a sequence selected from the group consisting of SEQ ID NO:23 to SEQ ID NO:33, or a variant or fragment thereof. In some embodiments, the agonistic, anti-GITR monoclonal antibody comprises a humanized light chain variable domain (V_{L}) comprising a sequence selected from the group consisting of SEQ ID NO:46, SEQ ID NO:48, SEQ ID NO:50, SEQ ID NO:52, SEQ ID NO:54, SEQ ID NO:56, SEQ ID NO:58, SEQ ID NO:60, SEQ ID NO:62, SEQ ID NO:64, and SEQ ID NO:66, or a variant or fragment thereof, and a humanized heavy chain variable domain (V_{H}) comprising a sequence selected from the group consisting of SEQ ID NO:45, SEQ ID NO:47, SEQ ID NO:49, SEQ ID NO:51, SEQ ID NO:53, SEQ ID NO:55, SEQ ID NO:57, SEQ ID NO:59, SEQ ID NO:61, SEQ ID NO:63, and SEQ ID NO:65, or a variant or fragment thereof. In some embodiments, the agonistic, anti-GITR monoclonal antibody further comprises a heavy chain constant region, wherein the heavy chain constant region comprises a γ1, γ2, γ3, or γ4 human heavy chain constant region or a variant thereof. In various embodiments the light chain constant region comprises a lambda or a kappa human light chain constant region.

[1211] In an embodiment, the GITR binding molecule is an agonistic, anti-GITR monoclonal antibody with a structure and preparation described in U.S. Patent Application Publication No. US 2013/0108641 A1 (Sanofi SA) and International Patent Application Publication No. WO 2011/028683 A1 (Sanofi SA), the disclosures of which are incorporated by reference herein. In an embodiment, a GITR binding molecule includes monoclonal antibodies and variants and fragments thereof, including humanized and chimeric recombinant antibodies, that bind human GITR, comprising a heavy chain variable domain (V_{H}) selected from the group consisting of SEQ ID NO:133, SEQ ID NO:135, SEQ ID NO:136, SEQ ID NO:137, SEQ ID NO:138, SEQ ID NO:139, SEQ ID NO:144, SEQ ID NO: 146, SEQ ID NO: 148, and SEQ ID NO: 150, and a light chain variable domain (V_{L}) selected from the group consisting of SEQ ID NO:134, SEQ ID NO:140, SEQ ID NO:141, SEQ ID NO:142, SEQ ID NO:143, SEQ ID NO:145, SEQ ID NO:147, SEQ ID NO:149, and SEQ ID NO:151. In an embodiment, the GITR binding molecule is an agonistic, anti-GITR monoclonal antibody comprising (a) one, two, or three heavy chain CDRs selected from the group consisting of SEQ ID NO:152, SEQ ID NO:153, SEQ ID NO:154, SEQ ID NO:158, SEQ ID NO:159, SEQ ID NO:160, SEQ ID NO:165, SEQ ID NO:166, SEQ ID NO:167, SEQ ID NO:168, SEQ ID NO:169, SEQ ID NO: 170, SEQ ID NO: 174, and conservative amino acid substitutions thereof, and (b) one, two, or three light chain CDRs selected from the group consisting of SEQ ID NO: 155, SEQ ID NO:156, SEQ ID NO:157, SEQ ID NO:161, SEQ ID NO:162, SEQ ID NO:163, SEQ ID NO: 164, SEQ ID NO: 171, SEQ ID NO: 172, SEQ ID NO: 173, and conservative amino acid substitutions thereof. In an embodiment, the GITR binding molecule is an agonistic, anti-GITR monoclonal antibody selected from the group consisting of 2155, 698, 706, 827, 1649, and 1718.

[1212] In an embodiment, the GITR binding molecule is an agonistic, anti-GITR monoclonal antibody with a structure and preparation described in US Patent Application Publication No. US 2015/0064204 and International Patent Application Publication No. WO 2015/031667 A1 (Amgen, Inc.), the disclosures of which are incorporated by reference herein. In an embodiment, the GITR binding molecule is a fully-human, agonistic, anti-GITR monoclonal antibody selected from the group consisting of 1D7, 33C9, 33F6, 34G4, 35B10, 41E11, 41G5, 42A11, 44C1, 45A8, 46E11, 48H12, 48H7, 49D9, 49E2, 48A9, 5H7, 7A10, and 9H6. In an embodiment, the GITR binding molecule is a fully-human, agonistic, anti-GITR monoclonal antibody with an amino acid sequence identity of greater than 99% to the sequence of an antibody selected from the group consisting of 1D7, 33C9, 33F6, 34G4, 35B10, 41E11, 41G5, 42A11, 44C1, 45A8, 46E11, 48H12, 48H7, 49D9, 49E2, 48A9, 5H7, 7A10, and 9H6. In an embodiment, the GITR binding molecule is a fully-human, agonistic, anti-GITR monoclonal antibody with an amino acid sequence identity of greater than 98% to the sequence of an antibody selected from the group consisting of 1D7, 33C9, 33F6, 34G4, 35B10, 41E11, 41G5, 42A11, 44C1, 45A8, 46E11, 48H12, 48H7, 49D9, 49E2, 48A9, 5H7, 7A10, and 9H6. In an embodiment, the GITR binding molecule is a fully-human, agonistic, anti-GITR monoclonal antibody selected from the group consisting of 9H6v3, 5H7v2, 33C9v2, 41G5v2, and 7A10v1, as described in US Patent Application Publication No. US 2015/0064204 A1, the disclosure of which is incorporated by reference herein. In an embodiment, the GITR binding molecule is a fully-human, agonistic, anti-GITR monoclonal antibody selected from the group consisting of 44C1v1, 45A8v1, 49D9v1, 49E2v1, 48A9v1, 5H7v1, 5H7v2, 5H7v3, 5H7v5, 5H7v7, 5H7v9, 5H7v10, 5H7v11, 5H7v13, 5H7v14, 5H7v17, 5H7v18, 5H7v19, 5H7v22, 7A10v1, 7A10v2, 7A10v3, 7A10v4, 7A10v5, 9H6v1, 9H6v2, 9H6v3, 9H6v4, 9H6v5, 9H6v6, 33C9v1, 33C9v2, 33C9v3, 33C9v4, 33C9v5, 41G5v1, 41G5v2, 41G5v3, 41G5v4, and 41G5v5, as described in US Patent Application Publication No. US 2015/0064204 A1, the disclosure of which is incorporated by reference herein.

[1213] In an embodiment, the agonistic anti-GITR monoclonal antibody is 1D7, or an antigen-binding fragment, derivative, conjugate, variant, or biosimilar thereof. The preparation, properties, and uses of the fully human 1D7 antibody, and its variants, are described in U.S. Patent Application Publication No. US 2015/0064204 A1, the disclosure of which is incorporated by reference herein. In an embodiment, an agonistic anti-GITR monoclonal antibody comprises a heavy chain comprising SEQ ID NO: 175 and a light chain comprising SEQ ID NO: 176. In an embodiment, an agonistic anti-GITR monoclonal antibody comprises a heavy chain with a sequence identity of greater than 99% in comparison to SEQ ID NO: 175 and a light chain with a sequence identity of greater than 99% in comparison to SEQ ID NO: 176. In an embodiment, an agonistic anti-GITR monoclonal antibody comprises a heavy chain with a sequence identity of greater than 98% in comparison to SEQ ID NO:175 and a light chain with a sequence identity of greater than 98% in comparison to SEQ ID NO:176. In an embodiment, an agonistic anti-GITR monoclonal antibody comprises a heavy chain with a sequence identity of greater than 97% in comparison to SEQ ID NO: 175 and a light chain with a sequence identity of greater than 97% in comparison to SEQ ID NO: 176. In an embodiment, an agonistic anti-GITR monoclonal antibody comprises a heavy chain with a sequence identity of greater than 95% in comparison to SEQ ID NO:175 and a light chain with a sequence identity of greater than 95% in comparison to SEQ ID NO:176. In an embodiment, an agonistic anti-GITR monoclonal antibody comprises a heavy chain with a sequence identity of greater than 90% in comparison to SEQ ID NO: 175 and a light chain with a sequence identity of greater than 90% in comparison to SEQ ID NO: 176. In an embodiment, an agonistic anti-GITR monoclonal antibody comprises a variable heavy chain comprising SEQ ID NO: 177 and a variable light chain comprising SEQ ID NO: 178. In an embodiment, an agonistic anti-GITR monoclonal antibody comprises a variable heavy chain with a sequence identity of greater than 99% in comparison to SEQ ID NO: 177 and a variable light chain with a sequence identity of greater than 99% in comparison to SEQ ID NO: 178. In an embodiment, an agonistic anti-GITR monoclonal antibody comprises a variable heavy chain with a sequence identity of greater than 98% in comparison to SEQ ID NO: 177 and a variable light chain with a sequence identity of greater than 98% in comparison to SEQ ID NO: 178. In an embodiment, an agonistic anti-GITR monoclonal antibody comprises a variable heavy chain with a sequence identity of greater than 97% in comparison to SEQ ID NO: 177 and a variable light chain with a sequence identity of greater than 97% in comparison to SEQ ID NO: 178. In an embodiment, an agonistic anti-GITR monoclonal antibody comprises a variable heavy chain with a sequence identity of greater than 95% in comparison to SEQ ID NO: 177 and a variable light chain with a sequence identity of greater than 95% in comparison to SEQ ID NO: 178. In an embodiment, an agonistic anti-GITR monoclonal antibody comprises a variable heavy chain with a sequence identity of greater than 90% in comparison to SEQ ID NO: 177 and a variable light chain with a sequence identity of greater than 90% in comparison to SEQ ID NO: 178. In an embodiment, the GITR binding molecule is an agonistic, anti-GITR monoclonal antibody comprising (a) one, two, or three heavy chain CDRs selected from the group consisting of SEQ ID NO:179, SEQ ID NO:180, and SEQ ID NO:181, and conservative amino acid substitutions thereof, and (b) one, two, or three light chain CDRs selected from the group consisting of SEQ ID NO: 182, SEQ ID NO:183, and SEQ ID NO: 184, and conservative amino acid substitutions thereof. In an embodiment, the GITR binding molecule is an agonistic, anti-GITR monoclonal antibody comprising three heavy chain CDRs comprising SEQ ID NO:179, SEQ ID NO: 180, and SEQ ID NO: 181, and three light chain CDRs comprising SEQ ID NO: 182, SEQ ID NO:183, and SEQ ID NO:184.

[1214] In an embodiment, the agonistic anti-GITR monoclonal antibody is 33C9, or an antigen-binding fragment, derivative, conjugate, variant, or biosimilar thereof. The preparation, properties, and uses of the fully human 33C9 antibody, and its variants, are described in U.S. Patent Application Publication No. US 2015/0064204 A1, the disclosure of which is incorporated by reference herein. In an embodiment, an agonistic anti-GITR monoclonal antibody comprises a heavy chain comprising SEQ ID NO: 185 and a light chain comprising SEQ ID NO: 186. In an embodiment, an agonistic anti-GITR monoclonal antibody comprises a heavy chain with a sequence identity of greater than 99% in comparison to SEQ ID NO: 185 and a light chain with a sequence identity of greater than 99% in comparison to SEQ ID NO: 186. In an embodiment, an agonistic anti-GITR monoclonal antibody comprises a heavy chain with a sequence identity of greater than 98% in comparison to SEQ ID NO:185 and a light chain with a sequence identity of greater than 98% in comparison to SEQ ID NO:186. In an embodiment, an agonistic anti-GITR monoclonal antibody comprises a heavy chain with a sequence identity of greater than 97% in comparison to SEQ ID NO: 185 and a light chain with a sequence identity of greater than 97% in comparison to SEQ ID NO:186. In an embodiment, an agonistic anti-GITR monoclonal antibody comprises a heavy chain with a sequence identity of greater than 95% in comparison to SEQ ID NO:185 and a light chain with a sequence identity of greater than 95% in comparison to SEQ ID NO:186. In an embodiment, an agonistic anti-GITR monoclonal antibody comprises a heavy chain with a sequence identity of greater than 90% in comparison to SEQ ID NO: 185 and a light chain with a sequence identity of greater than 90% in comparison to SEQ ID NO: 186. In an embodiment, an agonistic anti-GITR monoclonal antibody comprises a variable heavy chain comprising SEQ ID NO: 187 and a variable light chain comprising SEQ ID NO: 188. In an embodiment, an agonistic anti-GITR monoclonal antibody comprises a variable heavy chain with a sequence identity of greater than 99% in comparison to SEQ ID NO: 187 and a variable light chain with a sequence identity of greater than 99% in comparison to SEQ ID NO: 188. In an embodiment, an agonistic anti-GITR monoclonal antibody comprises a variable heavy chain with a sequence identity of greater than 98% in comparison to SEQ ID NO: 187 and a variable light chain with a sequence identity of greater than 98% in comparison to SEQ ID NO: 188. In an embodiment, an agonistic anti-GITR monoclonal antibody comprises a variable heavy chain with a sequence identity of greater than 97% in comparison to SEQ ID NO: 187 and a variable light chain with a sequence identity of greater than 97% in comparison to SEQ ID NO: 188. In an embodiment, an agonistic anti-GITR monoclonal antibody comprises a variable heavy chain with a sequence identity of greater than 95% in comparison to SEQ ID NO: 187 and a variable light chain with a sequence identity of greater than 95% in comparison to SEQ ID NO: 188. In an embodiment, an agonistic anti-GITR monoclonal antibody comprises a variable heavy chain with a sequence identity of greater than 90% in comparison to SEQ ID NO: 187 and a variable light chain with a sequence identity of greater than 90% in comparison to SEQ ID NO: 188. In an embodiment, the GITR binding molecule is an agonistic, anti-GITR monoclonal antibody comprising (a) one, two, or three heavy chain CDRs selected from the group consisting of SEQ ID NO:189, SEQ ID NO:190, and SEQ ID NO:191, and conservative amino acid substitutions thereof, and (b) one, two, or three light chain CDRs selected from the group consisting of SEQ ID NO: 192, SEQ ID NO:193, and SEQ ID NO: 194, and conservative amino acid substitutions thereof. In an embodiment, the GITR binding molecule is an agonistic, anti-GITR monoclonal antibody comprising three heavy chain CDRs comprising SEQ ID NO:189, SEQ ID NO: 190, and SEQ ID NO: 191, and three light chain CDRs comprising SEQ ID NO: 192, SEQ ID NO:193, and SEQ ID NO:194.

[1215] In an embodiment, the agonistic anti-GITR monoclonal antibody is 33F6, or an antigen-binding fragment, derivative, conjugate, variant, or biosimilar thereof. The preparation, properties, and uses of the fully human 33F6 antibody, and its variants, are described in U.S. Patent Application Publication No. US 2015/0064204 A1, the disclosure of which is incorporated by reference herein. In an embodiment, an agonistic anti-GITR monoclonal antibody comprises a heavy chain comprising SEQ ID NO: 195 and a light chain comprising SEQ ID NO: 196. In an embodiment, an agonistic anti-GITR monoclonal antibody comprises a heavy chain with a sequence identity of greater than 99% in comparison to SEQ ID NO: 195 and a light chain with a sequence identity of greater than 99% in comparison to SEQ ID NO: 196. In an embodiment, an agonistic anti-GITR monoclonal antibody comprises a heavy chain with a sequence identity of greater than 98% in comparison to SEQ ID NO:195 and a light chain with a sequence identity of greater than 98% in comparison to SEQ ID NO:196. In an embodiment, an agonistic anti-GITR monoclonal antibody comprises a heavy chain with a sequence identity of greater than 97% in comparison to SEQ ID NO: 195 and a light chain with a sequence identity of greater than 97% in comparison to SEQ ID NO:196. In an embodiment, an agonistic anti-GITR monoclonal antibody comprises a heavy chain with a sequence identity of greater than 95% in comparison to SEQ ID NO:195 and a light chain with a sequence identity of greater than 95% in comparison to SEQ ID NO:196. In an embodiment, an agonistic anti-GITR monoclonal antibody comprises a heavy chain with a sequence identity of greater than 90% in comparison to SEQ ID NO: 195 and a light chain with a sequence identity of greater than 90% in comparison to SEQ ID NO: 196. In an embodiment, an agonistic anti-GITR monoclonal antibody comprises a variable heavy chain comprising SEQ ID NO: 197 and a variable light chain comprising SEQ ID NO: 198. In an embodiment, an agonistic anti-GITR monoclonal antibody comprises a variable heavy chain with a sequence identity of greater than 99% in comparison to SEQ ID NO: 197 and a variable light chain with a sequence identity of greater than 99% in comparison to SEQ ID NO: 198. In an embodiment, an agonistic anti-GITR monoclonal antibody comprises a variable heavy chain with a sequence identity of greater than 98% in comparison to SEQ ID NO: 197 and a variable light chain with a sequence identity of greater than 98% in comparison to SEQ ID NO: 198. In an embodiment, an agonistic anti-GITR monoclonal antibody comprises a variable heavy chain with a sequence identity of greater than 97% in comparison to SEQ ID NO: 197 and a variable light chain with a sequence identity of greater than 97% in comparison to SEQ ID NO: 198. In an embodiment, an agonistic anti-GITR monoclonal antibody comprises a variable heavy chain with a sequence identity of greater than 95% in comparison to SEQ ID NO: 197 and a variable light chain with a sequence identity of greater than 95% in comparison to SEQ ID NO: 198. In an embodiment, an agonistic anti-GITR monoclonal antibody comprises a variable heavy chain with a sequence identity of greater than 90% in comparison to SEQ ID NO: 197 and a variable light chain with a sequence identity of greater than 90% in comparison to SEQ ID NO: 198. In an embodiment, the GITR binding molecule is an agonistic, anti-GITR monoclonal antibody comprising (a) one, two, or three heavy chain CDRs selected from the group consisting of SEQ ID NO:199, SEQ ID NO:200, and SEQ ID NO:201, and conservative amino acid substitutions thereof, and (b) one, two, or three light chain CDRs selected from the group consisting of SEQ ID NO:202, SEQ ID NO:203, and SEQ ID NO:204, and conservative amino acid substitutions thereof. In an embodiment, the GITR binding molecule is an agonistic, anti-GITR monoclonal antibody comprising three heavy chain CDRs comprising SEQ ID NO:199, SEQ ID NO:200, and SEQ ID NO:201, and three light chain CDRs comprising SEQ ID NO:202, SEQ ID NO:203, and SEQ ID NO:204.

[1216] In an embodiment, the agonistic anti-GITR monoclonal antibody is 34G4, or an antigen-binding fragment, derivative, conjugate, variant, or biosimilar thereof. The preparation, properties, and uses of the fully human 34G4 antibody, and its variants, are described in U.S. Patent Application Publication No. US 2015/0064204 A1, the disclosure of which is incorporated by reference herein. In an embodiment, an agonistic anti-GITR monoclonal antibody comprises a heavy chain comprising SEQ ID NO:205 and a light chain comprising SEQ ID NO:206. In an embodiment, an agonistic anti-GITR monoclonal antibody comprises a heavy chain with a sequence identity of greater than 99% in comparison to SEQ ID NO:205 and a light chain with a sequence identity of greater than 99% in comparison to SEQ ID NO:206. In an embodiment, an agonistic anti-GITR monoclonal antibody comprises a heavy chain with a sequence identity of greater than 98% in comparison to SEQ ID NO:205 and a light chain with a sequence identity of greater than 98% in comparison to SEQ ID NO:206. In an embodiment, an agonistic anti-GITR monoclonal antibody comprises a heavy chain with a sequence identity of greater than 97% in comparison to SEQ ID NO:205 and a light chain with a sequence identity of greater than 97% in comparison to SEQ ID NO:206. In an embodiment, an agonistic anti-GITR monoclonal antibody comprises a heavy chain with a sequence identity of greater than 95% in comparison to SEQ ID NO:205 and a light chain with a sequence identity of greater than 95% in comparison to SEQ ID NO:206. In an embodiment, an agonistic anti-GITR monoclonal antibody comprises a heavy chain with a sequence identity of greater than 90% in comparison to SEQ ID NO:205 and a light chain with a sequence identity of greater than 90% in comparison to SEQ ID NO:206. In an embodiment, an agonistic anti-GITR monoclonal antibody comprises a variable heavy chain comprising SEQ ID NO:207 and a variable light chain comprising SEQ ID NO:208. In an embodiment, an agonistic anti-GITR monoclonal antibody comprises a variable heavy chain with a sequence identity of greater than 99% in comparison to SEQ ID NO:207 and a variable light chain with a sequence identity of greater than 99% in comparison to SEQ ID NO:208. In an embodiment, an agonistic anti-GITR monoclonal antibody comprises a variable heavy chain with a sequence identity of greater than 98% in comparison to SEQ ID NO:207 and a variable light chain with a sequence identity of greater than 98% in comparison to SEQ ID NO:208. In an embodiment, an agonistic anti-GITR monoclonal antibody comprises a variable heavy chain with a sequence identity of greater than 97% in comparison to SEQ ID NO:207 and a variable light chain with a sequence identity of greater than 97% in comparison to SEQ ID NO:208. In an embodiment, an agonistic anti-GITR monoclonal antibody comprises a variable heavy chain with a sequence identity of greater than 95% in comparison to SEQ ID NO:207 and a variable light chain with a sequence identity of greater than 95% in comparison to SEQ ID NO:208. In an embodiment, an agonistic anti-GITR monoclonal antibody comprises a variable heavy chain with a sequence identity of greater than 90% in comparison to SEQ ID NO:207 and a variable light chain with a sequence identity of greater than 90% in comparison to SEQ ID NO:208. In an embodiment, the GITR binding molecule is an agonistic, anti-GITR monoclonal antibody comprising (a) one, two, or three heavy chain CDRs selected from the group consisting of SEQ ID NO:209, SEQ ID NO:210, and SEQ ID NO:211, and conservative amino acid substitutions thereof, and (b) one, two, or three light chain CDRs selected from the group consisting of SEQ ID NO:212, SEQ ID NO:213, and SEQ ID NO:214, and conservative amino acid substitutions thereof. In an embodiment, the GITR binding molecule is an agonistic, anti-GITR monoclonal antibody comprising three heavy chain CDRs comprising SEQ ID NO:209, SEQ ID NO:210, and SEQ ID NO:211, and three light chain CDRs comprising SEQ ID NO:212, SEQ ID NO:213, and SEQ ID NO:214.

[1217] In an embodiment, the agonistic anti-GITR monoclonal antibody is 35B10, or an antigen-binding fragment, derivative, conjugate, variant, or biosimilar thereof. The preparation, properties, and uses of the fully human 35B10 antibody, and its variants, are described in U.S. Patent Application Publication No. US 2015/0064204 A1, the disclosure of which is incorporated by reference herein. In an embodiment, an agonistic anti-GITR monoclonal antibody comprises a heavy chain comprising SEQ ID NO:215 and a light chain comprising SEQ ID NO:216. In an embodiment, an agonistic anti-GITR monoclonal antibody comprises a heavy chain with a sequence identity of greater than 99% in comparison to SEQ ID NO:215 and a light chain with a sequence identity of greater than 99% in comparison to SEQ ID NO:216. In an embodiment, an agonistic anti-GITR monoclonal antibody comprises a heavy chain with a sequence identity of greater than 98% in comparison to SEQ ID NO:215 and a light chain with a sequence identity of greater than 98% in comparison to SEQ ID NO:216. In an embodiment, an agonistic anti-GITR monoclonal antibody comprises a heavy chain with a sequence identity of greater than 97% in comparison to SEQ ID NO:215 and a light chain with a sequence identity of greater than 97% in comparison to SEQ ID NO:216. In an embodiment, an agonistic anti-GITR monoclonal antibody comprises a heavy chain with a sequence identity of greater than 95% in comparison to SEQ ID NO:215 and a light chain with a sequence identity of greater than 95% in comparison to SEQ ID NO:216. In an embodiment, an agonistic anti-GITR monoclonal antibody comprises a heavy chain with a sequence identity of greater than 90% in comparison to SEQ ID NO:215 and a light chain with a sequence identity of greater than 90% in comparison to SEQ ID NO:216. In an embodiment, an agonistic anti-GITR monoclonal antibody comprises a variable heavy chain comprising SEQ ID NO:217 and a variable light chain comprising SEQ ID NO:218. In an embodiment, an agonistic anti-GITR monoclonal antibody comprises a variable heavy chain with a sequence identity of greater than 99% in comparison to SEQ ID NO:217 and a variable light chain with a sequence identity of greater than 99% in comparison to SEQ ID NO:218. In an embodiment, an agonistic anti-GITR monoclonal antibody comprises a variable heavy chain with a sequence identity of greater than 98% in comparison to SEQ ID NO:217 and a variable light chain with a sequence identity of greater than 98% in comparison to SEQ ID NO:218. In an embodiment, an agonistic anti-GITR monoclonal antibody comprises a variable heavy chain with a sequence identity of greater than 97% in comparison to SEQ ID NO:217 and a variable light chain with a sequence identity of greater than 97% in comparison to SEQ ID NO:218. In an embodiment, an agonistic anti-GITR monoclonal antibody comprises a variable heavy chain with a sequence identity of greater than 95% in comparison to SEQ ID NO:217 and a variable light chain with a sequence identity of greater than 95% in comparison to SEQ ID NO:218. In an embodiment, an agonistic anti-GITR monoclonal antibody comprises a variable heavy chain with a sequence identity of greater than 90% in comparison to SEQ ID NO:217 and a variable light chain with a sequence identity of greater than 90% in comparison to SEQ ID NO:218. In an embodiment, the GITR binding molecule is an agonistic, anti-GITR monoclonal antibody comprising (a) one, two, or three heavy chain CDRs selected from the group consisting of SEQ ID NO:219, SEQ ID NO:220, and SEQ ID NO:221, and conservative amino acid substitutions thereof, and (b) one, two, or three light chain CDRs selected from the group consisting of SEQ ID NO:222, SEQ ID NO:223, and SEQ ID NO:224, and conservative amino acid substitutions thereof. In an embodiment, the GITR binding molecule is an agonistic, anti-GITR monoclonal antibody comprising three heavy chain CDRs comprising SEQ ID NO:219, SEQ ID NO:220, and SEQ ID NO:221, and three light chain CDRs comprising SEQ ID NO:222, SEQ ID NO:223, and SEQ ID NO:224.

[1218] In an embodiment, the agonistic anti-GITR monoclonal antibody is 41E11, or an antigen-binding fragment, derivative, conjugate, variant, or biosimilar thereof. The preparation, properties, and uses of the fully human 41E11 antibody, and its variants, are described in U.S. Patent Application Publication No. US 2015/0064204 A1, the disclosure of which is incorporated by reference herein. In an embodiment, an agonistic anti-GITR monoclonal antibody comprises a heavy chain comprising SEQ ID NO:225 and a light chain comprising SEQ ID NO:226. In an embodiment, an agonistic anti-GITR monoclonal antibody comprises a heavy chain with a sequence identity of greater than 99% in comparison to SEQ ID NO:225 and a light chain with a sequence identity of greater than 99% in comparison to SEQ ID NO:226. In an embodiment, an agonistic anti-GITR monoclonal antibody comprises a heavy chain with a sequence identity of greater than 98% in comparison to SEQ ID NO:225 and a light chain with a sequence identity of greater than 98% in comparison to SEQ ID NO:226. In an embodiment, an agonistic anti-GITR monoclonal antibody comprises a heavy chain with a sequence identity of greater than 97% in comparison to SEQ ID NO:225 and a light chain with a sequence identity of greater than 97% in comparison to SEQ ID NO:226. In an embodiment, an agonistic anti-GITR monoclonal antibody comprises a heavy chain with a sequence identity of greater than 95% in comparison to SEQ ID NO:225 and a light chain with a sequence identity of greater than 95% in comparison to SEQ ID NO:226. In an embodiment, an agonistic anti-GITR monoclonal antibody comprises a heavy chain with a sequence identity of greater than 90% in comparison to SEQ ID NO:225 and a light chain with a sequence identity of greater than 90% in comparison to SEQ ID NO:226. In an embodiment, an agonistic anti-GITR monoclonal antibody comprises a variable heavy chain comprising SEQ ID NO:227 and a variable light chain comprising SEQ ID NO:228. In an embodiment, an agonistic anti-GITR monoclonal antibody comprises a variable heavy chain with a sequence identity of greater than 99% in comparison to SEQ ID NO:227 and a variable light chain with a sequence identity of greater than 99% in comparison to SEQ ID NO:228. In an embodiment, an agonistic anti-GITR monoclonal antibody comprises a variable heavy chain with a sequence identity of greater than 98% in comparison to SEQ ID NO:227 and a variable light chain with a sequence identity of greater than 98% in comparison to SEQ ID NO:228. In an embodiment, an agonistic anti-GITR monoclonal antibody comprises a variable heavy chain with a sequence identity of greater than 97% in comparison to SEQ ID NO:227 and a variable light chain with a sequence identity of greater than 97% in comparison to SEQ ID NO:228. In an embodiment, an agonistic anti-GITR monoclonal antibody comprises a variable heavy chain with a sequence identity of greater than 95% in comparison to SEQ ID NO:227 and a variable light chain with a sequence identity of greater than 95% in comparison to SEQ ID NO:228. In an embodiment, an agonistic anti-GITR monoclonal antibody comprises a variable heavy chain with a sequence identity of greater than 90% in comparison to SEQ ID NO:227 and a variable light chain with a sequence identity of greater than 90% in comparison to SEQ ID NO:228. In an embodiment, the GITR binding molecule is an agonistic, anti-GITR monoclonal antibody comprising (a) one, two, or three heavy chain CDRs selected from the group consisting of SEQ ID NO:229, SEQ ID NO:230, and SEQ ID NO:231, and conservative amino acid substitutions thereof, and (b) one, two, or three light chain CDRs selected from the group consisting of SEQ ID NO:232, SEQ ID NO:233, and SEQ ID NO:234, and conservative amino acid substitutions thereof. In an embodiment, the GITR binding molecule is an agonistic, anti-GITR monoclonal antibody comprising three heavy chain CDRs comprising SEQ ID NO:229, SEQ ID NO:230, and SEQ ID NO:231, and three light chain CDRs comprising SEQ ID NO:232, SEQ ID NO:233, and SEQ ID NO:234.

[1219] In an embodiment, the agonistic anti-GITR monoclonal antibody is 41G5, or an antigen-binding fragment, derivative, conjugate, variant, or biosimilar thereof. The preparation, properties, and uses of the fully human 41G5 antibody, and its variants, are described in U.S. Patent Application Publication No. US 2015/0064204 A1, the disclosure of which is incorporated by reference herein. In an embodiment, an agonistic anti-GITR monoclonal antibody comprises a heavy chain comprising SEQ ID NO:235 and a light chain comprising SEQ ID NO:236. In an embodiment, an agonistic anti-GITR monoclonal antibody comprises a heavy chain with a sequence identity of greater than 99% in comparison to SEQ ID NO:235 and a light chain with a sequence identity of greater than 99% in comparison to SEQ ID NO:236. In an embodiment, an agonistic anti-GITR monoclonal antibody comprises a heavy chain with a sequence identity of greater than 98% in comparison to SEQ ID NO:235 and a light chain with a sequence identity of greater than 98% in comparison to SEQ ID NO:236. In an embodiment, an agonistic anti-GITR monoclonal antibody comprises a heavy chain with a sequence identity of greater than 97% in comparison to SEQ ID NO:235 and a light chain with a sequence identity of greater than 97% in comparison to SEQ ID NO:236. In an embodiment, an agonistic anti-GITR monoclonal antibody comprises a heavy chain with a sequence identity of greater than 95% in comparison to SEQ ID NO:235 and a light chain with a sequence identity of greater than 95% in comparison to SEQ ID NO:236. In an embodiment, an agonistic anti-GITR monoclonal antibody comprises a heavy chain with a sequence identity of greater than 90% in comparison to SEQ ID NO:235 and a light chain with a sequence identity of greater than 90% in comparison to SEQ ID NO:236. In an embodiment, an agonistic anti-GITR monoclonal antibody comprises a variable heavy chain comprising SEQ ID NO:237 and a variable light chain comprising SEQ ID NO:238. In an embodiment, an agonistic anti-GITR monoclonal antibody comprises a variable heavy chain with a sequence identity of greater than 99% in comparison to SEQ ID NO:237 and a variable light chain with a sequence identity of greater than 99% in comparison to SEQ ID NO:238. In an embodiment, an agonistic anti-GITR monoclonal antibody comprises a variable heavy chain with a sequence identity of greater than 98% in comparison to SEQ ID NO:237 and a variable light chain with a sequence identity of greater than 98% in comparison to SEQ ID NO:238. In an embodiment, an agonistic anti-GITR monoclonal antibody comprises a variable heavy chain with a sequence identity of greater than 97% in comparison to SEQ ID NO:237 and a variable light chain with a sequence identity of greater than 97% in comparison to SEQ ID NO:238. In an embodiment, an agonistic anti-GITR monoclonal antibody comprises a variable heavy chain with a sequence identity of greater than 95% in comparison to SEQ ID NO:237 and a variable light chain with a sequence identity of greater than 95% in comparison to SEQ ID NO:238. In an embodiment, an agonistic anti-GITR monoclonal antibody comprises a variable heavy chain with a sequence identity of greater than 90% in comparison to SEQ ID NO:237 and a variable light chain with a sequence identity of greater than 90% in comparison to SEQ ID NO:238. In an embodiment, the GITR binding molecule is an agonistic, anti-GITR monoclonal antibody comprising (a) one, two, or three heavy chain CDRs selected from the group consisting of SEQ ID NO:239, SEQ ID NO:240, and SEQ ID NO:241, and conservative amino acid substitutions thereof, and (b) one, two, or three light chain CDRs selected from the group consisting of SEQ ID NO:242, SEQ ID NO:243, and SEQ ID NO:244, and conservative amino acid substitutions thereof. In an embodiment, the GITR binding molecule is an agonistic, anti-GITR monoclonal antibody comprising three heavy chain CDRs comprising SEQ ID NO:239, SEQ ID NO:240, and SEQ ID NO:241, and three light chain CDRs comprising SEQ ID NO:242, SEQ ID NO:243, and SEQ ID NO:244.

[1220] In an embodiment, the agonistic anti-GITR monoclonal antibody is 42A11, or an antigen-binding fragment, derivative, conjugate, variant, or biosimilar thereof. The preparation, properties, and uses of the fully human 42A11 antibody, and its variants, are described in U.S. Patent Application Publication No. US 2015/0064204 A1, the disclosure of which is incorporated by reference herein. In an embodiment, an agonistic anti-GITR monoclonal antibody comprises a heavy chain comprising SEQ ID NO:245 and a light chain comprising SEQ ID NO:246. In an embodiment, an agonistic anti-GITR monoclonal antibody comprises a heavy chain with a sequence identity of greater than 99% in comparison to SEQ ID NO:245 and a light chain with a sequence identity of greater than 99% in comparison to SEQ ID NO:246. In an embodiment, an agonistic anti-GITR monoclonal antibody comprises a heavy chain with a sequence identity of greater than 98% in comparison to SEQ ID NO:245 and a light chain with a sequence identity of greater than 98% in comparison to SEQ ID NO:246. In an embodiment, an agonistic anti-GITR monoclonal antibody comprises a heavy chain with a sequence identity of greater than 97% in comparison to SEQ ID NO:245 and a light chain with a sequence identity of greater than 97% in comparison to SEQ ID NO:246. In an embodiment, an agonistic anti-GITR monoclonal antibody comprises a heavy chain with a sequence identity of greater than 95% in comparison to SEQ ID NO:245 and a light chain with a sequence identity of greater than 95% in comparison to SEQ ID NO:246. In an embodiment, an agonistic anti-GITR monoclonal antibody comprises a heavy chain with a sequence identity of greater than 90% in comparison to SEQ ID NO:245 and a light chain with a sequence identity of greater than 90% in comparison to SEQ ID NO:246. In an embodiment, an agonistic anti-GITR monoclonal antibody comprises a variable heavy chain comprising SEQ ID NO:247 and a variable light chain comprising SEQ ID NO:248. In an embodiment, an agonistic anti-GITR monoclonal antibody comprises a variable heavy chain with a sequence identity of greater than 99% in comparison to SEQ ID NO:247 and a variable light chain with a sequence identity of greater than 99% in comparison to SEQ ID NO:248. In an embodiment, an agonistic anti-GITR monoclonal antibody comprises a variable heavy chain with a sequence identity of greater than 98% in comparison to SEQ ID NO:247 and a variable light chain with a sequence identity of greater than 98% in comparison to SEQ ID NO:248. In an embodiment, an agonistic anti-GITR monoclonal antibody comprises a variable heavy chain with a sequence identity of greater than 97% in comparison to SEQ ID NO:247 and a variable light chain with a sequence identity of greater than 97% in comparison to SEQ ID NO:248. In an embodiment, an agonistic anti-GITR monoclonal antibody comprises a variable heavy chain with a sequence identity of greater than 95% in comparison to SEQ ID NO:247 and a variable light chain with a sequence identity of greater than 95% in comparison to SEQ ID NO:248. In an embodiment, an agonistic anti-GITR monoclonal antibody comprises a variable heavy chain with a sequence identity of greater than 90% in comparison to SEQ ID NO:247 and a variable light chain with a sequence identity of greater than 90% in comparison to SEQ ID NO:248. In an embodiment, the GITR binding molecule is an agonistic, anti-GITR monoclonal antibody comprising (a) one, two, or three heavy chain CDRs selected from the group consisting of SEQ ID NO:249, SEQ ID NO:250, and SEQ ID NO:251, and conservative amino acid substitutions thereof, and (b) one, two, or three light chain CDRs selected from the group consisting of SEQ ID NO:252, SEQ ID NO:253, and SEQ ID NO:254, and conservative amino acid substitutions thereof. In an embodiment, the GITR binding molecule is an agonistic, anti-GITR monoclonal antibody comprising three heavy chain CDRs comprising SEQ ID NO:249, SEQ ID NO:250, and SEQ ID NO:251, and three light chain CDRs comprising SEQ ID NO:252, SEQ ID NO:253, and SEQ ID NO:254.

[1221] In an embodiment, the agonistic anti-GITR monoclonal antibody is 44C1, or an antigen-binding fragment, derivative, conjugate, variant, or biosimilar thereof. The preparation, properties, and uses of the fully human 44C1 antibody, and its variants, are described in U.S. Patent Application Publication No. US 2015/0064204 A1, the disclosure of which is incorporated by reference herein. In an embodiment, an agonistic anti-GITR monoclonal antibody comprises a heavy chain comprising SEQ ID NO:255 and a light chain comprising SEQ ID NO:256. In an embodiment, an agonistic anti-GITR monoclonal antibody comprises a heavy chain with a sequence identity of greater than 99% in comparison to SEQ ID NO:255 and a light chain with a sequence identity of greater than 99% in comparison to SEQ ID NO:256. In an embodiment, an agonistic anti-GITR monoclonal antibody comprises a heavy chain with a sequence identity of greater than 98% in comparison to SEQ ID NO:255 and a light chain with a sequence identity of greater than 98% in comparison to SEQ ID NO:256. In an embodiment, an agonistic anti-GITR monoclonal antibody comprises a heavy chain with a sequence identity of greater than 97% in comparison to SEQ ID NO:255 and a light chain with a sequence identity of greater than 97% in comparison to SEQ ID NO:256. In an embodiment, an agonistic anti-GITR monoclonal antibody comprises a heavy chain with a sequence identity of greater than 95% in comparison to SEQ ID NO:255 and a light chain with a sequence identity of greater than 95% in comparison to SEQ ID NO:256. In an embodiment, an agonistic anti-GITR monoclonal antibody comprises a heavy chain with a sequence identity of greater than 90% in comparison to SEQ ID NO:255 and a light chain with a sequence identity of greater than 90% in comparison to SEQ ID NO:256. In an embodiment, an agonistic anti-GITR monoclonal antibody comprises a variable heavy chain comprising SEQ ID NO:257 and a variable light chain comprising SEQ ID NO:258. In an embodiment, an agonistic anti-GITR monoclonal antibody comprises a variable heavy chain with a sequence identity of greater than 99% in comparison to SEQ ID NO:257 and a variable light chain with a sequence identity of greater than 99% in comparison to SEQ ID NO:258. In an embodiment, an agonistic anti-GITR monoclonal antibody comprises a variable heavy chain with a sequence identity of greater than 98% in comparison to SEQ ID NO:257 and a variable light chain with a sequence identity of greater than 98% in comparison to SEQ ID NO:258. In an embodiment, an agonistic anti-GITR monoclonal antibody comprises a variable heavy chain with a sequence identity of greater than 97% in comparison to SEQ ID NO:257 and a variable light chain with a sequence identity of greater than 97% in comparison to SEQ ID NO:258. In an embodiment, an agonistic anti-GITR monoclonal antibody comprises a variable heavy chain with a sequence identity of greater than 95% in comparison to SEQ ID NO:257 and a variable light chain with a sequence identity of greater than 95% in comparison to SEQ ID NO:258. In an embodiment, an agonistic anti-GITR monoclonal antibody comprises a variable heavy chain with a sequence identity of greater than 90% in comparison to SEQ ID NO:257 and a variable light chain with a sequence identity of greater than 90% in comparison to SEQ ID NO:258. In an embodiment, the GITR binding molecule is an agonistic, anti-GITR monoclonal antibody comprising (a) one, two, or three heavy chain CDRs selected from the group consisting of SEQ ID NO:259, SEQ ID NO:260, and SEQ ID NO:261, and conservative amino acid substitutions thereof, and (b) one, two, or three light chain CDRs selected from the group consisting of SEQ ID NO:262, SEQ ID NO:263, and SEQ ID NO:264, and conservative amino acid substitutions thereof. In an embodiment, the GITR binding molecule is an agonistic, anti-GITR monoclonal antibody comprising three heavy chain CDRs comprising SEQ ID NO:259, SEQ ID NO:260, and SEQ ID NO:261, and three light chain CDRs comprising SEQ ID NO:262, SEQ ID NO:263, and SEQ ID NO:264.

[1222] In an embodiment, the agonistic anti-GITR monoclonal antibody is 45A8, or an antigen-binding fragment, derivative, conjugate, variant, or biosimilar thereof. The preparation, properties, and uses of the fully human 45A8 antibody, and its variants, are described in U.S. Patent Application Publication No. US 2015/0064204 A1, the disclosure of which is incorporated by reference herein. In an embodiment, an agonistic anti-GITR monoclonal antibody comprises a heavy chain comprising SEQ ID NO:265 and a light chain comprising SEQ ID NO:266. In an embodiment, an agonistic anti-GITR monoclonal antibody comprises a heavy chain with a sequence identity of greater than 99% in comparison to SEQ ID NO:265 and a light chain with a sequence identity of greater than 99% in comparison to SEQ ID NO:266. In an embodiment, an agonistic anti-GITR monoclonal antibody comprises a heavy chain with a sequence identity of greater than 98% in comparison to SEQ ID NO:265 and a light chain with a sequence identity of greater than 98% in comparison to SEQ ID NO:266. In an embodiment, an agonistic anti-GITR monoclonal antibody comprises a heavy chain with a sequence identity of greater than 97% in comparison to SEQ ID NO:265 and a light chain with a sequence identity of greater than 97% in comparison to SEQ ID NO:266. In an embodiment, an agonistic anti-GITR monoclonal antibody comprises a heavy chain with a sequence identity of greater than 95% in comparison to SEQ ID NO:265 and a light chain with a sequence identity of greater than 95% in comparison to SEQ ID NO:266. In an embodiment, an agonistic anti-GITR monoclonal antibody comprises a heavy chain with a sequence identity of greater than 90% in comparison to SEQ ID NO:265 and a light chain with a sequence identity of greater than 90% in comparison to SEQ ID NO:266. In an embodiment, an agonistic anti-GITR monoclonal antibody comprises a variable heavy chain comprising SEQ ID NO:267 and a variable light chain comprising SEQ ID NO:268. In an embodiment, an agonistic anti-GITR monoclonal antibody comprises a variable heavy chain with a sequence identity of greater than 99% in comparison to SEQ ID NO:267 and a variable light chain with a sequence identity of greater than 99% in comparison to SEQ ID NO:268. In an embodiment, an agonistic anti-GITR monoclonal antibody comprises a variable heavy chain with a sequence identity of greater than 98% in comparison to SEQ ID NO:267 and a variable light chain with a sequence identity of greater than 98% in comparison to SEQ ID NO:268. In an embodiment, an agonistic anti-GITR monoclonal antibody comprises a variable heavy chain with a sequence identity of greater than 97% in comparison to SEQ ID NO:267 and a variable light chain with a sequence identity of greater than 97% in comparison to SEQ ID NO:268. In an embodiment, an agonistic anti-GITR monoclonal antibody comprises a variable heavy chain with a sequence identity of greater than 95% in comparison to SEQ ID NO:267 and a variable light chain with a sequence identity of greater than 95% in comparison to SEQ ID NO:268. In an embodiment, an agonistic anti-GITR monoclonal antibody comprises a variable heavy chain with a sequence identity of greater than 90% in comparison to SEQ ID NO:267 and a variable light chain with a sequence identity of greater than 90% in comparison to SEQ ID NO:268. In an embodiment, the GITR binding molecule is an agonistic, anti-GITR monoclonal antibody comprising (a) one, two, or three heavy chain CDRs selected from the group consisting of SEQ ID NO:269, SEQ ID NO:270, and SEQ ID NO:271, and conservative amino acid substitutions thereof, and (b) one, two, or three light chain CDRs selected from the group consisting of SEQ ID NO:272, SEQ ID NO:273, and SEQ ID NO:274, and conservative amino acid substitutions thereof. In an embodiment, the GITR binding molecule is an agonistic, anti-GITR monoclonal antibody comprising three heavy chain CDRs comprising SEQ ID NO:269, SEQ ID NO:270, and SEQ ID NO:271, and three light chain CDRs comprising SEQ ID NO:272, SEQ ID NO:273, and SEQ ID NO:274.

[1223] In an embodiment, the agonistic anti-GITR monoclonal antibody is 46E11, or an antigen-binding fragment, derivative, conjugate, variant, or biosimilar thereof. The preparation, properties, and uses of the fully human 46E11 antibody, and its variants, are described in U.S. Patent Application Publication No. US 2015/0064204 A1, the disclosure of which is incorporated by reference herein. In an embodiment, an agonistic anti-GITR monoclonal antibody comprises a heavy chain comprising SEQ ID NO:275 and a light chain comprising SEQ ID NO:276. In an embodiment, an agonistic anti-GITR monoclonal antibody comprises a heavy chain with a sequence identity of greater than 99% in comparison to SEQ ID NO:275 and a light chain with a sequence identity of greater than 99% in comparison to SEQ ID NO:276. In an embodiment, an agonistic anti-GITR monoclonal antibody comprises a heavy chain with a sequence identity of greater than 98% in comparison to SEQ ID NO:275 and a light chain with a sequence identity of greater than 98% in comparison to SEQ ID NO:276. In an embodiment, an agonistic anti-GITR monoclonal antibody comprises a heavy chain with a sequence identity of greater than 97% in comparison to SEQ ID NO:275 and a light chain with a sequence identity of greater than 97% in comparison to SEQ ID NO:276. In an embodiment, an agonistic anti-GITR monoclonal antibody comprises a heavy chain with a sequence identity of greater than 95% in comparison to SEQ ID NO:275 and a light chain with a sequence identity of greater than 95% in comparison to SEQ ID NO:276. In an embodiment, an agonistic anti-GITR monoclonal antibody comprises a heavy chain with a sequence identity of greater than 90% in comparison to SEQ ID NO:275 and a light chain with a sequence identity of greater than 90% in comparison to SEQ ID NO:276. In an embodiment, an agonistic anti-GITR monoclonal antibody comprises a variable heavy chain comprising SEQ ID NO:277 and a variable light chain comprising SEQ ID NO:278. In an embodiment, an agonistic anti-GITR monoclonal antibody comprises a variable heavy chain with a sequence identity of greater than 99% in comparison to SEQ ID NO:277 and a variable light chain with a sequence identity of greater than 99% in comparison to SEQ ID NO:278. In an embodiment, an agonistic anti-GITR monoclonal antibody comprises a variable heavy chain with a sequence identity of greater than 98% in comparison to SEQ ID NO:277 and a variable light chain with a sequence identity of greater than 98% in comparison to SEQ ID NO:278. In an embodiment, an agonistic anti-GITR monoclonal antibody comprises a variable heavy chain with a sequence identity of greater than 97% in comparison to SEQ ID NO:277 and a variable light chain with a sequence identity of greater than 97% in comparison to SEQ ID NO:278. In an embodiment, an agonistic anti-GITR monoclonal antibody comprises a variable heavy chain with a sequence identity of greater than 95% in comparison to SEQ ID NO:277 and a variable light chain with a sequence identity of greater than 95% in comparison to SEQ ID NO:278. In an embodiment, an agonistic anti-GITR monoclonal antibody comprises a variable heavy chain with a sequence identity of greater than 90% in comparison to SEQ ID NO:277 and a variable light chain with a sequence identity of greater than 90% in comparison to SEQ ID NO:278. In an embodiment, the GITR binding molecule is an agonistic, anti-GITR monoclonal antibody comprising (a) one, two, or three heavy chain CDRs selected from the group consisting of SEQ ID NO:279, SEQ ID NO:280, and SEQ ID NO:281, and conservative amino acid substitutions thereof, and (b) one, two, or three light chain CDRs selected from the group consisting of SEQ ID NO:282, SEQ ID NO:283, and SEQ ID NO:284, and conservative amino acid substitutions thereof. In an embodiment, the GITR binding molecule is an agonistic, anti-GITR monoclonal antibody comprising three heavy chain CDRs comprising SEQ ID NO:279, SEQ ID NO:280, and SEQ ID NO:281, and three light chain CDRs comprising SEQ ID NO:282, SEQ ID NO:283, and SEQ ID NO:284.

[1224] In an embodiment, the agonistic anti-GITR monoclonal antibody is 48H12, or an antigen-binding fragment, derivative, conjugate, variant, or biosimilar thereof. The preparation, properties, and uses of the fully human 48H12 antibody, and its variants, are described in U.S. Patent Application Publication No. US 2015/0064204 A1, the disclosure of which is incorporated by reference herein. In an embodiment, an agonistic anti-GITR monoclonal antibody comprises a heavy chain comprising SEQ ID NO:285 and a light chain comprising SEQ ID NO:286. In an embodiment, an agonistic anti-GITR monoclonal antibody comprises a heavy chain with a sequence identity of greater than 99% in comparison to SEQ ID NO:285 and a light chain with a sequence identity of greater than 99% in comparison to SEQ ID NO:286. In an embodiment, an agonistic anti-GITR monoclonal antibody comprises a heavy chain with a sequence identity of greater than 98% in comparison to SEQ ID NO:285 and a light chain with a sequence identity of greater than 98% in comparison to SEQ ID NO:286. In an embodiment, an agonistic anti-GITR monoclonal antibody comprises a heavy chain with a sequence identity of greater than 97% in comparison to SEQ ID NO:285 and a light chain with a sequence identity of greater than 97% in comparison to SEQ ID NO:286. In an embodiment, an agonistic anti-GITR monoclonal antibody comprises a heavy chain with a sequence identity of greater than 95% in comparison to SEQ ID NO:285 and a light chain with a sequence identity of greater than 95% in comparison to SEQ ID NO:286. In an embodiment, an agonistic anti-GITR monoclonal antibody comprises a heavy chain with a sequence identity of greater than 90% in comparison to SEQ ID NO:285 and a light chain with a sequence identity of greater than 90% in comparison to SEQ ID NO:286. In an embodiment, an agonistic anti-GITR monoclonal antibody comprises a variable heavy chain comprising SEQ ID NO:287 and a variable light chain comprising SEQ ID NO:288. In an embodiment, an agonistic anti-GITR monoclonal antibody comprises a variable heavy chain with a sequence identity of greater than 99% in comparison to SEQ ID NO:287 and a variable light chain with a sequence identity of greater than 99% in comparison to SEQ ID NO:288. In an embodiment, an agonistic anti-GITR monoclonal antibody comprises a variable heavy chain with a sequence identity of greater than 98% in comparison to SEQ ID NO:287 and a variable light chain with a sequence identity of greater than 98% in comparison to SEQ ID NO:288. In an embodiment, an agonistic anti-GITR monoclonal antibody comprises a variable heavy chain with a sequence identity of greater than 97% in comparison to SEQ ID NO:287 and a variable light chain with a sequence identity of greater than 97% in comparison to SEQ ID NO:288. In an embodiment, an agonistic anti-GITR monoclonal antibody comprises a variable heavy chain with a sequence identity of greater than 95% in comparison to SEQ ID NO:287 and a variable light chain with a sequence identity of greater than 95% in comparison to SEQ ID NO:288. In an embodiment, an agonistic anti-GITR monoclonal antibody comprises a variable heavy chain with a sequence identity of greater than 90% in comparison to SEQ ID NO:287 and a variable light chain with a sequence identity of greater than 90% in comparison to SEQ ID NO:288. In an embodiment, the GITR binding molecule is an agonistic, anti-GITR monoclonal antibody comprising (a) one, two, or three heavy chain CDRs selected from the group consisting of SEQ ID NO:289, SEQ ID NO:290, and SEQ ID NO:291, and conservative amino acid substitutions thereof, and (b) one, two, or three light chain CDRs selected from the group consisting of SEQ ID NO:292, SEQ ID NO:293, and SEQ ID NO:294, and conservative amino acid substitutions thereof. In an embodiment, the GITR binding molecule is an agonistic, anti-GITR monoclonal antibody comprising three heavy chain CDRs comprising SEQ ID NO:289, SEQ ID NO:290, and SEQ ID NO:291, and three light chain CDRs comprising SEQ ID NO:292, SEQ ID NO:293, and SEQ ID NO:294.

[1225] In an embodiment, the agonistic anti-GITR monoclonal antibody is 48H7, or an antigen-binding fragment, derivative, conjugate, variant, or biosimilar thereof. The preparation, properties, and uses of the fully human 48H7 antibody, and its variants, are described in U.S. Patent Application Publication No. US 2015/0064204 A1, the disclosure of which is incorporated by reference herein. In an embodiment, an agonistic anti-GITR monoclonal antibody comprises a heavy chain comprising SEQ ID NO:295 and a light chain comprising SEQ ID NO:296. In an embodiment, an agonistic anti-GITR monoclonal antibody comprises a heavy chain with a sequence identity of greater than 99% in comparison to SEQ ID NO:295 and a light chain with a sequence identity of greater than 99% in comparison to SEQ ID NO:296. In an embodiment, an agonistic anti-GITR monoclonal antibody comprises a heavy chain with a sequence identity of greater than 98% in comparison to SEQ ID NO:295 and a light chain with a sequence identity of greater than 98% in comparison to SEQ ID NO:296. In an embodiment, an agonistic anti-GITR monoclonal antibody comprises a heavy chain with a sequence identity of greater than 97% in comparison to SEQ ID NO:295 and a light chain with a sequence identity of greater than 97% in comparison to SEQ ID NO:296. In an embodiment, an agonistic anti-GITR monoclonal antibody comprises a heavy chain with a sequence identity of greater than 95% in comparison to SEQ ID NO:295 and a light chain with a sequence identity of greater than 95% in comparison to SEQ ID NO:296. In an embodiment, an agonistic anti-GITR monoclonal antibody comprises a heavy chain with a sequence identity of greater than 90% in comparison to SEQ ID NO:295 and a light chain with a sequence identity of greater than 90% in comparison to SEQ ID NO:296. In an embodiment, an agonistic anti-GITR monoclonal antibody comprises a variable heavy chain comprising SEQ ID NO:297 and a variable light chain comprising SEQ ID NO:298. In an embodiment, an agonistic anti-GITR monoclonal antibody comprises a variable heavy chain with a sequence identity of greater than 99% in comparison to SEQ ID NO:297 and a variable light chain with a sequence identity of greater than 99% in comparison to SEQ ID NO:298. In an embodiment, an agonistic anti-GITR monoclonal antibody comprises a variable heavy chain with a sequence identity of greater than 98% in comparison to SEQ ID NO:297 and a variable light chain with a sequence identity of greater than 98% in comparison to SEQ ID NO:298. In an embodiment, an agonistic anti-GITR monoclonal antibody comprises a variable heavy chain with a sequence identity of greater than 97% in comparison to SEQ ID NO:297 and a variable light chain with a sequence identity of greater than 97% in comparison to SEQ ID NO:298. In an embodiment, an agonistic anti-GITR monoclonal antibody comprises a variable heavy chain with a sequence identity of greater than 95% in comparison to SEQ ID NO:297 and a variable light chain with a sequence identity of greater than 95% in comparison to SEQ ID NO:298. In an embodiment, an agonistic anti-GITR monoclonal antibody comprises a variable heavy chain with a sequence identity of greater than 90% in comparison to SEQ ID NO:297 and a variable light chain with a sequence identity of greater than 90% in comparison to SEQ ID NO:298. In an embodiment, the GITR binding molecule is an agonistic, anti-GITR monoclonal antibody comprising (a) one, two, or three heavy chain CDRs selected from the group consisting of SEQ ID NO:299, SEQ ID NO:300, and SEQ ID NO:301, and conservative amino acid substitutions thereof, and (b) one, two, or three light chain CDRs selected from the group consisting of SEQ ID NO:302, SEQ ID NO:303, and SEQ ID NO:304, and conservative amino acid substitutions thereof. In an embodiment, the GITR binding molecule is an agonistic, anti-GITR monoclonal antibody comprising three heavy chain CDRs comprising SEQ ID NO:299, SEQ ID NO:300, and SEQ ID NO:301, and three light chain CDRs comprising SEQ ID NO:302, SEQ ID NO:303, and SEQ ID NO:304.

[1226] In an embodiment, the agonistic anti-GITR monoclonal antibody is 49D9, or an antigen-binding fragment, derivative, conjugate, variant, or biosimilar thereof. The preparation, properties, and uses of the fully human 49D9 antibody, and its variants, are described in U.S. Patent Application Publication No. US 2015/0064204 A1, the disclosure of which is incorporated by reference herein. In an embodiment, an agonistic anti-GITR monoclonal antibody comprises a heavy chain comprising SEQ ID NO:305 and a light chain comprising SEQ ID NO:306. In an embodiment, an agonistic anti-GITR monoclonal antibody comprises a heavy chain with a sequence identity of greater than 99% in comparison to SEQ ID NO:305 and a light chain with a sequence identity of greater than 99% in comparison to SEQ ID NO:306. In an embodiment, an agonistic anti-GITR monoclonal antibody comprises a heavy chain with a sequence identity of greater than 98% in comparison to SEQ ID NO:305 and a light chain with a sequence identity of greater than 98% in comparison to SEQ ID NO:306. In an embodiment, an agonistic anti-GITR monoclonal antibody comprises a heavy chain with a sequence identity of greater than 97% in comparison to SEQ ID NO:305 and a light chain with a sequence identity of greater than 97% in comparison to SEQ ID NO:306. In an embodiment, an agonistic anti-GITR monoclonal antibody comprises a heavy chain with a sequence identity of greater than 95% in comparison to SEQ ID NO:305 and a light chain with a sequence identity of greater than 95% in comparison to SEQ ID NO:306. In an embodiment, an agonistic anti-GITR monoclonal antibody comprises a heavy chain with a sequence identity of greater than 90% in comparison to SEQ ID NO:305 and a light chain with a sequence identity of greater than 90% in comparison to SEQ ID NO:306. In an embodiment, an agonistic anti-GITR monoclonal antibody comprises a variable heavy chain comprising SEQ ID NO:307 and a variable light chain comprising SEQ ID NO:308. In an embodiment, an agonistic anti-GITR monoclonal antibody comprises a variable heavy chain with a sequence identity of greater than 99% in comparison to SEQ ID NO:307 and a variable light chain with a sequence identity of greater than 99% in comparison to SEQ ID NO:308. In an embodiment, an agonistic anti-GITR monoclonal antibody comprises a variable heavy chain with a sequence identity of greater than 98% in comparison to SEQ ID NO:307 and a variable light chain with a sequence identity of greater than 98% in comparison to SEQ ID NO:308. In an embodiment, an agonistic anti-GITR monoclonal antibody comprises a variable heavy chain with a sequence identity of greater than 97% in comparison to SEQ ID NO:307 and a variable light chain with a sequence identity of greater than 97% in comparison to SEQ ID NO:308. In an embodiment, an agonistic anti-GITR monoclonal antibody comprises a variable heavy chain with a sequence identity of greater than 95% in comparison to SEQ ID NO:307 and a variable light chain with a sequence identity of greater than 95% in comparison to SEQ ID NO:308. In an embodiment, an agonistic anti-GITR monoclonal antibody comprises a variable heavy chain with a sequence identity of greater than 90% in comparison to SEQ ID NO:307 and a variable light chain with a sequence identity of greater than 90% in comparison to SEQ ID NO:308. In an embodiment, the GITR binding molecule is an agonistic, anti-GITR monoclonal antibody comprising (a) one, two, or three heavy chain CDRs selected from the group consisting of SEQ ID NO:309, SEQ ID NO:310, and SEQ ID NO:311, and conservative amino acid substitutions thereof, and (b) one, two, or three light chain CDRs selected from the group consisting of SEQ ID NO:312, SEQ ID NO:313, and SEQ ID NO:314, and conservative amino acid substitutions thereof. In an embodiment, the GITR binding molecule is an agonistic, anti-GITR monoclonal antibody comprising three heavy chain CDRs comprising SEQ ID NO:309, SEQ ID NO:310, and SEQ ID NO:311, and three light chain CDRs comprising SEQ ID NO:312, SEQ ID NO:313, and SEQ ID NO:314.

[1227] In an embodiment, the agonistic anti-GITR monoclonal antibody is 49E2, or an antigen-binding fragment, derivative, conjugate, variant, or biosimilar thereof. The preparation, properties, and uses of the fully human 49E2 antibody, and its variants, are described in U.S. Patent Application Publication No. US 2015/0064204 A1, the disclosure of which is incorporated by reference herein. In an embodiment, an agonistic anti-GITR monoclonal antibody comprises a heavy chain comprising SEQ ID NO:315 and a light chain comprising SEQ ID NO:316. In an embodiment, an agonistic anti-GITR monoclonal antibody comprises a heavy chain with a sequence identity of greater than 99% in comparison to SEQ ID NO:315 and a light chain with a sequence identity of greater than 99% in comparison to SEQ ID NO:316. In an embodiment, an agonistic anti-GITR monoclonal antibody comprises a heavy chain with a sequence identity of greater than 98% in comparison to SEQ ID NO:315 and a light chain with a sequence identity of greater than 98% in comparison to SEQ ID NO:316. In an embodiment, an agonistic anti-GITR monoclonal antibody comprises a heavy chain with a sequence identity of greater than 97% in comparison to SEQ ID NO:315 and a light chain with a sequence identity of greater than 97% in comparison to SEQ ID NO:316. In an embodiment, an agonistic anti-GITR monoclonal antibody comprises a heavy chain with a sequence identity of greater than 95% in comparison to SEQ ID NO:315 and a light chain with a sequence identity of greater than 95% in comparison to SEQ ID NO:316. In an embodiment, an agonistic anti-GITR monoclonal antibody comprises a heavy chain with a sequence identity of greater than 90% in comparison to SEQ ID NO:315 and a light chain with a sequence identity of greater than 90% in comparison to SEQ ID NO:316. In an embodiment, an agonistic anti-GITR monoclonal antibody comprises a variable heavy chain comprising SEQ ID NO:317 and a variable light chain comprising SEQ ID NO:318. In an embodiment, an agonistic anti-GITR monoclonal antibody comprises a variable heavy chain with a sequence identity of greater than 99% in comparison to SEQ ID NO:317 and a variable light chain with a sequence identity of greater than 99% in comparison to SEQ ID NO:318. In an embodiment, an agonistic anti-GITR monoclonal antibody comprises a variable heavy chain with a sequence identity of greater than 98% in comparison to SEQ ID NO:317 and a variable light chain with a sequence identity of greater than 98% in comparison to SEQ ID NO:318. In an embodiment, an agonistic anti-GITR monoclonal antibody comprises a variable heavy chain with a sequence identity of greater than 97% in comparison to SEQ ID NO:317 and a variable light chain with a sequence identity of greater than 97% in comparison to SEQ ID NO:318. In an embodiment, an agonistic anti-GITR monoclonal antibody comprises a variable heavy chain with a sequence identity of greater than 95% in comparison to SEQ ID NO:317 and a variable light chain with a sequence identity of greater than 95% in comparison to SEQ ID NO:318. In an embodiment, an agonistic anti-GITR monoclonal antibody comprises a variable heavy chain with a sequence identity of greater than 90% in comparison to SEQ ID NO:317 and a variable light chain with a sequence identity of greater than 90% in comparison to SEQ ID NO:318. In an embodiment, the GITR binding molecule is an agonistic, anti-GITR monoclonal antibody comprising (a) one, two, or three heavy chain CDRs selected from the group consisting of SEQ ID NO:319, SEQ ID NO:320, and SEQ ID NO:321, and conservative amino acid substitutions thereof, and (b) one, two, or three light chain CDRs selected from the group consisting of SEQ ID NO:322, SEQ ID NO:323, and SEQ ID NO:324, and conservative amino acid substitutions thereof. In an embodiment, the GITR binding molecule is an agonistic, anti-GITR monoclonal antibody comprising three heavy chain CDRs comprising SEQ ID NO:319, SEQ ID NO:320, and SEQ ID NO:321, and three light chain CDRs comprising SEQ ID NO:322, SEQ ID NO:323, and SEQ ID NO:324.

[1228] In an embodiment, the agonistic anti-GITR monoclonal antibody is 48A9, or an antigen-binding fragment, derivative, conjugate, variant, or biosimilar thereof. The preparation, properties, and uses of the fully human 48A9 antibody, and its variants, are described in U.S. Patent Application Publication No. US 2015/0064204 A1, the disclosure of which is incorporated by reference herein. In an embodiment, an agonistic anti-GITR monoclonal antibody comprises a heavy chain comprising SEQ ID NO:325 and a light chain comprising SEQ ID NO:326. In an embodiment, an agonistic anti-GITR monoclonal antibody comprises a heavy chain with a sequence identity of greater than 99% in comparison to SEQ ID NO:325 and a light chain with a sequence identity of greater than 99% in comparison to SEQ ID NO:326. In an embodiment, an agonistic anti-GITR monoclonal antibody comprises a heavy chain with a sequence identity of greater than 98% in comparison to SEQ ID NO:325 and a light chain with a sequence identity of greater than 98% in comparison to SEQ ID NO:326. In an embodiment, an agonistic anti-GITR monoclonal antibody comprises a heavy chain with a sequence identity of greater than 97% in comparison to SEQ ID NO:325 and a light chain with a sequence identity of greater than 97% in comparison to SEQ ID NO:326. In an embodiment, an agonistic anti-GITR monoclonal antibody comprises a heavy chain with a sequence identity of greater than 95% in comparison to SEQ ID NO:325 and a light chain with a sequence identity of greater than 95% in comparison to SEQ ID NO:326. In an embodiment, an agonistic anti-GITR monoclonal antibody comprises a heavy chain with a sequence identity of greater than 90% in comparison to SEQ ID NO:325 and a light chain with a sequence identity of greater than 90% in comparison to SEQ ID NO:326. In an embodiment, an agonistic anti-GITR monoclonal antibody comprises a variable heavy chain comprising SEQ ID NO:327 and a variable light chain comprising SEQ ID NO:328. In an embodiment, an agonistic anti-GITR monoclonal antibody comprises a variable heavy chain with a sequence identity of greater than 99% in comparison to SEQ ID NO:327 and a variable light chain with a sequence identity of greater than 99% in comparison to SEQ ID NO:328. In an embodiment, an agonistic anti-GITR monoclonal antibody comprises a variable heavy chain with a sequence identity of greater than 98% in comparison to SEQ ID NO:327 and a variable light chain with a sequence identity of greater than 98% in comparison to SEQ ID NO:328. In an embodiment, an agonistic anti-GITR monoclonal antibody comprises a variable heavy chain with a sequence identity of greater than 97% in comparison to SEQ ID NO:327 and a variable light chain with a sequence identity of greater than 97% in comparison to SEQ ID NO:328. In an embodiment, an agonistic anti-GITR monoclonal antibody comprises a variable heavy chain with a sequence identity of greater than 95% in comparison to SEQ ID NO:327 and a variable light chain with a sequence identity of greater than 95% in comparison to SEQ ID NO:328. In an embodiment, an agonistic anti-GITR monoclonal antibody comprises a variable heavy chain with a sequence identity of greater than 90% in comparison to SEQ ID NO:327 and a variable light chain with a sequence identity of greater than 90% in comparison to SEQ ID NO:328. In an embodiment, the GITR binding molecule is an agonistic, anti-GITR monoclonal antibody comprising (a) one, two, or three heavy chain CDRs selected from the group consisting of SEQ ID NO:329, SEQ ID NO:330, and SEQ ID NO:331, and conservative amino acid substitutions thereof, and (b) one, two, or three light chain CDRs selected from the group consisting of SEQ ID NO:332, SEQ ID NO:333, and SEQ ID NO:334, and conservative amino acid substitutions thereof. In an embodiment, the GITR binding molecule is an agonistic, anti-GITR monoclonal antibody comprising three heavy chain CDRs comprising SEQ ID NO:329, SEQ ID NO:330, and SEQ ID NO:331, and three light chain CDRs comprising SEQ ID NO:332, SEQ ID NO:333, and SEQ ID NO:334.

[1229] In an embodiment, the agonistic anti-GITR monoclonal antibody is 5H7, or an antigen-binding fragment, derivative, conjugate, variant, or biosimilar thereof. The preparation, properties, and uses of the fully human 5H7 antibody, and its variants, are described in U.S. Patent Application Publication No. US 2015/0064204 A1, the disclosure of which is incorporated by reference herein. In an embodiment, an agonistic anti-GITR monoclonal antibody comprises a heavy chain comprising SEQ ID NO:335 and a light chain comprising SEQ ID NO:336. In an embodiment, an agonistic anti-GITR monoclonal antibody comprises a heavy chain with a sequence identity of greater than 99% in comparison to SEQ ID NO:335 and a light chain with a sequence identity of greater than 99% in comparison to SEQ ID NO:336. In an embodiment, an agonistic anti-GITR monoclonal antibody comprises a heavy chain with a sequence identity of greater than 98% in comparison to SEQ ID NO:335 and a light chain with a sequence identity of greater than 98% in comparison to SEQ ID NO:336. In an embodiment, an agonistic anti-GITR monoclonal antibody comprises a heavy chain with a sequence identity of greater than 97% in comparison to SEQ ID NO:335 and a light chain with a sequence identity of greater than 97% in comparison to SEQ ID NO:336. In an embodiment, an agonistic anti-GITR monoclonal antibody comprises a heavy chain with a sequence identity of greater than 95% in comparison to SEQ ID NO:335 and a light chain with a sequence identity of greater than 95% in comparison to SEQ ID NO:336. In an embodiment, an agonistic anti-GITR monoclonal antibody comprises a heavy chain with a sequence identity of greater than 90% in comparison to SEQ ID NO:335 and a light chain with a sequence identity of greater than 90% in comparison to SEQ ID NO:336. In an embodiment, an agonistic anti-GITR monoclonal antibody comprises a variable heavy chain comprising SEQ ID NO:337 and a variable light chain comprising SEQ ID NO:338. In an embodiment, an agonistic anti-GITR monoclonal antibody comprises a variable heavy chain with a sequence identity of greater than 99% in comparison to SEQ ID NO:337 and a variable light chain with a sequence identity of greater than 99% in comparison to SEQ ID NO:338. In an embodiment, an agonistic anti-GITR monoclonal antibody comprises a variable heavy chain with a sequence identity of greater than 98% in comparison to SEQ ID NO:337 and a variable light chain with a sequence identity of greater than 98% in comparison to SEQ ID NO:338. In an embodiment, an agonistic anti-GITR monoclonal antibody comprises a variable heavy chain with a sequence identity of greater than 97% in comparison to SEQ ID NO:337 and a variable light chain with a sequence identity of greater than 97% in comparison to SEQ ID NO:338. In an embodiment, an agonistic anti-GITR monoclonal antibody comprises a variable heavy chain with a sequence identity of greater than 95% in comparison to SEQ ID NO:337 and a variable light chain with a sequence identity of greater than 95% in comparison to SEQ ID NO:338. In an embodiment, an agonistic anti-GITR monoclonal antibody comprises a variable heavy chain with a sequence identity of greater than 90% in comparison to SEQ ID NO:337 and a variable light chain with a sequence identity of greater than 90% in comparison to SEQ ID NO:338. In an embodiment, the GITR binding molecule is an agonistic, anti-GITR monoclonal antibody comprising (a) one, two, or three heavy chain CDRs selected from the group consisting of SEQ ID NO:339, SEQ ID NO:340, and SEQ ID NO:341, and conservative amino acid substitutions thereof, and (b) one, two, or three light chain CDRs selected from the group consisting of SEQ ID NO:342, SEQ ID NO:343, and SEQ ID NO:344, and conservative amino acid substitutions thereof. In an embodiment, the GITR binding molecule is an agonistic, anti-GITR monoclonal antibody comprising three heavy chain CDRs comprising SEQ ID NO:339, SEQ ID NO:340, and SEQ ID NO:341, and three light chain CDRs comprising SEQ ID NO:342, SEQ ID NO:343, and SEQ ID NO:344.

[1230] In an embodiment, the agonistic anti-GITR monoclonal antibody is 7A10, or an antigen-binding fragment, derivative, conjugate, variant, or biosimilar thereof. The preparation, properties, and uses of the fully human 7A10 antibody, and its variants, are described in U.S. Patent Application Publication No. US 2015/0064204 A1, the disclosure of which is incorporated by reference herein. In an embodiment, an agonistic anti-GITR monoclonal antibody comprises a heavy chain comprising SEQ ID NO:345 and a light chain comprising SEQ ID NO:346. In an embodiment, an agonistic anti-GITR monoclonal antibody comprises a heavy chain with a sequence identity of greater than 99% in comparison to SEQ ID NO:345 and a light chain with a sequence identity of greater than 99% in comparison to SEQ ID NO:346. In an embodiment, an agonistic anti-GITR monoclonal antibody comprises a heavy chain with a sequence identity of greater than 98% in comparison to SEQ ID NO:345 and a light chain with a sequence identity of greater than 98% in comparison to SEQ ID NO:346. In an embodiment, an agonistic anti-GITR monoclonal antibody comprises a heavy chain with a sequence identity of greater than 97% in comparison to SEQ ID NO:345 and a light chain with a sequence identity of greater than 97% in comparison to SEQ ID NO:346. In an embodiment, an agonistic anti-GITR monoclonal antibody comprises a heavy chain with a sequence identity of greater than 95% in comparison to SEQ ID NO:345 and a light chain with a sequence identity of greater than 95% in comparison to SEQ ID NO:346. In an embodiment, an agonistic anti-GITR monoclonal antibody comprises a heavy chain with a sequence identity of greater than 90% in comparison to SEQ ID NO:345 and a light chain with a sequence identity of greater than 90% in comparison to SEQ ID NO:346. In an embodiment, an agonistic anti-GITR monoclonal antibody comprises a variable heavy chain comprising SEQ ID NO:347 and a variable light chain comprising SEQ ID NO:348. In an embodiment, an agonistic anti-GITR monoclonal antibody comprises a variable heavy chain with a sequence identity of greater than 99% in comparison to SEQ ID NO:347 and a variable light chain with a sequence identity of greater than 99% in comparison to SEQ ID NO:348. In an embodiment, an agonistic anti-GITR monoclonal antibody comprises a variable heavy chain with a sequence identity of greater than 98% in comparison to SEQ ID NO:347 and a variable light chain with a sequence identity of greater than 98% in comparison to SEQ ID NO:348. In an embodiment, an agonistic anti-GITR monoclonal antibody comprises a variable heavy chain with a sequence identity of greater than 97% in comparison to SEQ ID NO:347 and a variable light chain with a sequence identity of greater than 97% in comparison to SEQ ID NO:348. In an embodiment, an agonistic anti-GITR monoclonal antibody comprises a variable heavy chain with a sequence identity of greater than 95% in comparison to SEQ ID NO:347 and a variable light chain with a sequence identity of greater than 95% in comparison to SEQ ID NO:348. In an embodiment, an agonistic anti-GITR monoclonal antibody comprises a variable heavy chain with a sequence identity of greater than 90% in comparison to SEQ ID NO:347 and a variable light chain with a sequence identity of greater than 90% in comparison to SEQ ID NO:348. In an embodiment, the GITR binding molecule is an agonistic, anti-GITR monoclonal antibody comprising (a) one, two, or three heavy chain CDRs selected from the group consisting of SEQ ID NO:349, SEQ ID NO:350, and SEQ ID NO:351, and conservative amino acid substitutions thereof, and (b) one, two, or three light chain CDRs selected from the group consisting of SEQ ID NO:352, SEQ ID NO:353, and SEQ ID NO:354, and conservative amino acid substitutions thereof. In an embodiment, the GITR binding molecule is an agonistic, anti-GITR monoclonal antibody comprising three heavy chain CDRs comprising SEQ ID NO:349, SEQ ID NO:350, and SEQ ID NO:351, and three light chain CDRs comprising SEQ ID NO:352, SEQ ID NO:353, and SEQ ID NO:354.

[1231] In an embodiment, the agonistic anti-GITR monoclonal antibody is 9H6, or an antigen-binding fragment, derivative, conjugate, variant, or biosimilar thereof. The preparation, properties, and uses of the fully human 9H6 antibody, and its variants, are described in U.S. Patent Application Publication No. US 2015/0064204 A1, the disclosure of which is incorporated by reference herein. In an embodiment, an agonistic anti-GITR monoclonal antibody comprises a heavy chain comprising SEQ ID NO:355 and a light chain comprising SEQ ID NO:356. In an embodiment, an agonistic anti-GITR monoclonal antibody comprises a heavy chain with a sequence identity of greater than 99% in comparison to SEQ ID NO:355 and a light chain with a sequence identity of greater than 99% in comparison to SEQ ID NO:356. In an embodiment, an agonistic anti-GITR monoclonal antibody comprises a heavy chain with a sequence identity of greater than 98% in comparison to SEQ ID NO:355 and a light chain with a sequence identity of greater than 98% in comparison to SEQ ID NO:356. In an embodiment, an agonistic anti-GITR monoclonal antibody comprises a heavy chain with a sequence identity of greater than 97% in comparison to SEQ ID NO:355 and a light chain with a sequence identity of greater than 97% in comparison to SEQ ID NO:356. In an embodiment, an agonistic anti-GITR monoclonal antibody comprises a heavy chain with a sequence identity of greater than 95% in comparison to SEQ ID NO:355 and a light chain with a sequence identity of greater than 95% in comparison to SEQ ID NO:356. In an embodiment, an agonistic anti-GITR monoclonal antibody comprises a heavy chain with a sequence identity of greater than 90% in comparison to SEQ ID NO:355 and a light chain with a sequence identity of greater than 90% in comparison to SEQ ID NO:356. In an embodiment, an agonistic anti-GITR monoclonal antibody comprises a variable heavy chain comprising SEQ ID NO:357 and a variable light chain comprising SEQ ID NO:358. In an embodiment, an agonistic anti-GITR monoclonal antibody comprises a variable heavy chain with a sequence identity of greater than 99% in comparison to SEQ ID NO:357 and a variable light chain with a sequence identity of greater than 99% in comparison to SEQ ID NO:358. In an embodiment, an agonistic anti-GITR monoclonal antibody comprises a variable heavy chain with a sequence identity of greater than 98% in comparison to SEQ ID NO:357 and a variable light chain with a sequence identity of greater than 98% in comparison to SEQ ID NO:358. In an embodiment, an agonistic anti-GITR monoclonal antibody comprises a variable heavy chain with a sequence identity of greater than 97% in comparison to SEQ ID NO:357 and a variable light chain with a sequence identity of greater than 97% in comparison to SEQ ID NO:358. In an embodiment, an agonistic anti-GITR monoclonal antibody comprises a variable heavy chain with a sequence identity of greater than 95% in comparison to SEQ ID NO:357 and a variable light chain with a sequence identity of greater than 95% in comparison to SEQ ID NO:358. In an embodiment, an agonistic anti-GITR monoclonal antibody comprises a variable heavy chain with a sequence identity of greater than 90% in comparison to SEQ ID NO:357 and a variable light chain with a sequence identity of greater than 90% in comparison to SEQ ID NO:358. In an embodiment, the GITR binding molecule is an agonistic, anti-GITR monoclonal antibody comprising (a) one, two, or three heavy chain CDRs selected from the group consisting of SEQ ID NO:359, SEQ ID NO:360, and SEQ ID NO:361, and conservative amino acid substitutions thereof, and (b) one, two, or three light chain CDRs selected from the group consisting of SEQ ID NO:362, SEQ ID NO:363, and SEQ ID NO:364, and conservative amino acid substitutions thereof. In an embodiment, the GITR binding molecule is an agonistic, anti-GITR monoclonal antibody comprising three heavy chain CDRs comprising SEQ ID NO:359, SEQ ID NO:360, and SEQ ID NO:361, and three light chain CDRs comprising SEQ ID NO:362, SEQ ID NO:363, and SEQ ID NO:364.

TABLE 2
Selected anti-GITR agonist monoclonal antibody sequences.

| Identifier | Sequence (One-Letter Amino Acid Symbols) | |
|---|---|---|
| SEQ ID NO: 3 | QVTLRESGPA LVKPTQTLTL TCTFSGFSLS TSGMGVGWIR QPPGKALEWL AHIWWDDDKY | 60 |
| humanized 6C8 | YNPSLKSRLT ISKDTSKNQV VLTMTNMDPV DTATYYCART RRYFPFAYWG QGTLVTVSSA | 120 |
| heavy chain | STKGPSVFPL APSSKSTSGG TAALGCLVKD YFPEPVTVSW NSGALTSGVH TFPAVLQSSG | 180 |
| variant | LYSLSSVVTV PSSSLGTQTY ICNVNHKPSN TKVDKKVEPK SCDKTHTCPP CPAPELLGGP | 240 |
| | SVFLFPPKPK DTLMISRTPE VTCVVVDVSH EDPEVKFNWY VDGVEVHNAK TKPREEQYNS | 300 |
| | TYRVVSVLTV LHQDWLNGKE YKCKVSNKAL PAPIEKTISK AKGQPREPQV YTLPPSRDEL | 360 |
| | TKNQVSLTCL VKGFYPSDIA VEWESNGQPE NNYKTTPPVL DSDGSFFLYS KLTVDKSRWQ | 420 |
| | QGNVFSCSVM HEALHNHYTQ KSLSLSPGK | 449 |
| SEQ ID NO: 4 | QVTLRESGPA LVKPTQTLTL TCTFSGFSLS TSGMGVGWIR QPPGKALEWL AHIWWDDDKY | 60 |
| humanized 6C8 | YNPSLKSRLT ISKDTSKNQV VLTMTNMDPV DTATYYCART RRYFPFAYWG QGTLVTVSSA | 120 |
| heavy chain | STKGPSVFPL APSSKSTSGG TAALGCLVKD YFPEPVTVSW NSGALTSGVH TFPAVLQSSG | 180 |
| variant | LYSLSSVVTV PSSSLGTQTY ICNVNHKPSN TKVDKKVEPK SCDKTHTCPP CPAPELLGGP | 240 |
| | SVFLFPPKPK DTLMISRTPE VTCVVVDVSH EDPEVKFNWY VDGVEVHNAK TKPREEQYAS | 300 |
| | TYRVVSVLTV LHQDWLNGKE YKCKVSNKAL PAPIEKTISK AKGQPREPQV YTLPPSRDEL | 360 |
| | TKNQVSLTCL VKGFYPSDIA VEWESNGQPE NNYKTTPPVL DSDGSFFLYS KLTVDKSRWQ | 420 |
| | QGNVFSCSVM HEALHNHYTQ KSLSLSPGK | 449 |
| SEQ ID NO: 5 | QVTLRESGPA LVKPTQTLTL TCTFSGFSLS TSGMGVGWIR QPPGKALEWL AHIWWDDDKY | 60 |
| humanized 6C8 | YQPSLKSRLT ISKDTSKNQV VLTMTNMDPV DTATYYCART RRYFPFAYWG QGTLVTVSSA | 120 |
| heavy chain | STKGPSVFPL APSSKSTSGG TAALGCLVKD YFPEPVTVSW NSGALTSGVH TFPAVLQSSG | 180 |
| variant | LYSLSSVVTV PSSSLGTQTY ICNVNHKPSN TKVDKKVEPK SCDKTHTCPP CPAPELLGGP | 240 |
| | SVFLFPPKPK DTLMISRTPE VTCVVVDVSH EDPEVKFNWY VDGVEVHNAK TKPREEQYNS | 300 |
| | TYRVVSVLTV LHQDWLNGKE YKCKVSNKAL PAPIEKTISK AKGQPREPQV YTLPPSRDEL | 360 |
| | TKNQVSLTCL VKGFYPSDIA VEWESNGQPE NNYKTTPPVL DSDGSFFLYS KLTVDKSRWQ | 420 |
| | QGNVFSCSVM HEALHNHYTQ KSLSLSPGK | 449 |
| SEQ ID NO: 6 | QVTLRESGPA LVKPTQTLTL TCTFSGFSLS TSGMGVGWIR QPPGKALEWL AHIWWDDDKY | 60 |
| humanized 6C8 | YQPSLKSRLT ISKDTSKNQV VLTMTNMDPV DTATYYCART RRYFPFAYWG QGTLVTVSSA | 120 |
| heavy chain | STKGPSVFPL APSSKSTSGG TAALGCLVKD YFPEPVTVSW NSGALTSGVH TFPAVLQSSG | 180 |
| variant | LYSLSSVVTV PSSSLGTQTY ICNVNHKPSN TKVDKKVEPK SCDKTHTCPP CPAPELLGGP | 240 |
| | SVFLFPPKPK DTLMISRTPE VTCVVVDVSH EDPEVKFNWY VDGVEVHNAK TKPREEQYAS | 300 |
| | TYRVVSVLTV LHQDWLNGKE YKCKVSNKAL PAPIEKTISK AKGQPREPQV YTLPPSRDEL | 360 |
| | TKNQVSLTCL VKGFYPSDIA VEWESNGQPE NNYKTTPPVL DSDGSFFLYS KLTVDKSRWQ | 420 |
| | QGNVFSCSVM HEALHNHYTQ KSLSLSPGK | 449 |
| SEQ ID NO: 7 | EIVMTQSPAT LSVSPGERAT LSCKASQNVG TNVAWYQQKP GQAPRLLIYS ASYRYSGIPA | 60 |
| humanized 6C8 | RFSGSGSGTE FTLTISSLQS EDFAVYYCQQ YNTDPLTFGG GTKVEIKRTV AAPSVFIFPP | 120 |
| light chain | SDEQLKSGTA SVVCLLNNFY PREAKVQWKV DNALQSGNSQ ESVTEQDSKD STYSLSSTLT | 180 |
| | LSKADYEKHK VYACEVTHQG LSSPVTKSFN RGEC | 214 |
| SEQ ID NO: 8 | MDRLTFSFLL LIVPAYVLS | 19 |
| 6C8 heavy chain | | |
| Leader | | |
| SEQ ID NO: 9 | METQSQVFVY MLLWLSGVDG | 20 |
| 6C8 light chain | | |
| Leader | | |
| SEQ ID NO: 10 | MDRLTFSFLL LIVPAYVLSQ VTLKESGPGI LKPSQTLSLT CSFSGFSLST SGMGVGWIRQ | 60 |
| humanized 6C8 | PSGKGLEWLA HIWWDDDKYY NPSLKSQLTI SKDTSRNQVF LKITSVDTAD AATYYCARTR | 120 |
| heavy chain | RYFPFAYWGQ GTLVTVSS | 138 |
| variable region | | |
| variant | | |
| SEQ ID NO: 11 | MDRLTFSFLL LIVPAYVLSQ VTLKESGPGI LKPSQTLSLT CSFSGFSLST SGMGVGWIRQ | 60 |
| humanized 6C8 | PSGKGLEWLA HIWWDDDKYY QPSLKSQLTI SKDTSRNQVF LKITSVDTAD AATYYCARTR | 120 |
| heavy chain | RYFPFAYWGQ GTLVTVSS | 138 |
| variable region | | |
| variant | | |
| SEQ ID NO: 12 | METQSQVFVY MLLWLSGVDG DIVMTQSQKF MSTSVGDRVS VTCKASQNVG TNVAWYQQKP | 60 |
| humanized 6C8 | GQSPKALIYS ASYRYSGVPD RFTGSGSGTD FTLTINNVHS EDLAEYFCQQ YNTDPLTFGA | 120 |
| light chain | GTKLEIK | 127 |
| variable region | | |
| SEQ ID NO: 13 | GFSLSTSGMG VG | 12 |
| 6C8 heavy chain | | |
| CDR1 | | |
| SEQ ID NO: 14 | HIWWDDDKYY NPSLKS | 16 |
| 6C8 heavy chain | | |
| CDR2 variant | | |
| SEQ ID NO: 15 | HIWWDDDKYY QPSLKS | 16 |
| 6C8 heavy chain | | |
| CDR2 variant | | |
| SEQ ID NO: 16 | TRRYFPFAY | 9 |
| 6C8 heavy chain | | |
| CDR3 | | |
| SEQ ID NO: 17 | KASQNVGTNV A | 11 |
| 6C8 light chain | | |
| CDR1 | | |
| SEQ ID NO: 18 | SASYRYS | 7 |
| 6C8 light chain | | |
| CDR2 | | |
| SEQ ID NO: 19 | QQYNTDPLT | 9 |
| 6C8 light chain | | |
| CDR3 | | |
| SEQ ID NO: 20 | QVTLKESGPG ILKPSQTLSL TCSFSGFSLS TSGMGVGWIR QPSGKGLEWL AHIWWDDDKY | 60 |
| chimeric 6C8 | YNPSLKSQLT ISKDTSRNQV FLKITSVDTA DAATYYCART RRYFPFAYWG QGTLVTVSSA | 120 |
| heavy chain | STKGPSVFPL APSSKSTSGG TAALGCLVKD YFPEPVTVSW NSGALTSGVH TFPAVLQSSG | 180 |
| variant | LYSLSSVVTV PSSSLGTQTY ICNVNHKPSN TKVDKKVEPK SCDKTHTCPP CPAPELLGGP | 240 |
| | SVFLFPPKPK DTLMISRTPE VTCVVVDVSH EDPEVKFNWY VDGVEVHNAK TKPREEQYNS | 300 |
| | TYRVVSVLTV LHQDWLNGKE YKCKVSNKAL PAPIEKTISK AKGQPREPQV YTLPPSRDEL | 360 |
| | TKNQVSLTCL VKGFYPSDIA VEWESNGQPE NNYKTTPPVL DSDGSFFLYS KLTVDKSRWQ | 420 |
| | QGNVFSCSVM HEALHNHYTQ KSLSLSPGK | 449 |
| SEQ ID NO: 21 | QVTLKESGPG ILKPSQTLSL TCSFSGFSLS TSGMGVGWIR QPSGKGLEWL AHIWWDDDKY | 60 |
| chimeric 6C8 | YNPSLKSQLT ISKDTSRNQV FLKITSVDTA DAATYYCART RRYFPFAYWG QGTLVTVSSA | 120 |
| heavy chain | STKGPSVFPL APSSKSTSGG TAALGCLVKD YFPEPVTVSW NSGALTSGVH TFPAVLQSSG | 180 |
| variant | LYSLSSVVTV PSSSLGTQTY ICNVNHKPSN TKVDKKVEPK SCDKTHTCPP CPAPELLGGP | 240 |
| | SVFLFPPKPK DTLMISRTPE VTCVVVDVSH EDPEVKFNWY VDGVEVHNAK TKPREEQYAS | 300 |
| | TYRVVSVLTV LHQDWLNGKE YKCKVSNKAL PAPIEKTISK AKGQPREPQV YTLPPSRDEL | 360 |
| | TKNQVSLTCL VKGFYPSDIA VEWESNGQPE NNYKTTPPVL DSDGSFFLYS KLTVDKSRWQ | 420 |
| | QGNVFSCSVM HEALHNHYTQ KSLSLSPGK | 449 |
| SEQ ID NO: 22 | DIVMTQSQKF MSTSVGDRVS VTCKASQNVG TNVAWYQQKP GQSPKALIYS ASYRYSGVPD | 60 |
| chimeric 6C8 | RFTGSGSGTD FTLTINNVHS EDLAEYFCQQ YNTDPLTFGA GTKLEIKRTV AAPSVFIFPP | 120 |
| light chain | SDEQLKSGTA SVVCLLNNFY PREAKVQWKV DNALQSGNSQ ESVTEQDSKD STYSLSSTLT | 180 |
| variant | LSKADYEKHK VYACEVTHQG LSSPVTKSFN RGEC | 214 |
| SEQ ID NO: 23 | EVNLVESGGG LVKPGGSLKV SCAASGFTFS SYAMSWVRQT PEKRLEWVAS ISSGGTTYYP | 60 |
| 36E5 heavy chain | DSVKGRFTIS RDNARNILYL QMSSLRSEDT AMYYCARVGG YYDSMDYWGQ GISVTDSS | 118 |
| variable region | | |
| SEQ ID NO: 24 | EVQLVESGGG LVQPGRSLKL SCAASGFTFS DYYMAWVRQA PTKGLEWVAY IHANGGSTYY | 60 |
| 3D6 heavy chain | RDSVRGRFSI SRDNGKSTLY LQMDSLRSED TATYYCTTGS FMYAADYYIM DAWGQGASVT | 120 |
| variable region | VSS | 123 |
| SEQ ID NO: 25 | DVQLQESGPG LVKPSQSLSL TCTVTGYSIT SDYAWNWIRQ FPGNKLEWMG YISYSGSTRY | 60 |
| 61G6 heavy chain | NPSLKSRISI TRDTSKNQFF LQLNSVTSED TATYYCARQL GLRFFDYWGQ GTTLTVSS | 118 |
| variable region | | |
| SEQ ID NO: 26 | QVQLQQSGAE LMKPGASVKI SCKATGYTFS RYWIEWIKQR PGHGLEWIGE ILPGSGSSNY | 60 |
| 6H6 heavy chain | NEKFKDKATF TADTSSNTAY MQFSSLTSED SAVYYCARKV YYYAMDFWGQ GTSVTVSS | 118 |
| variable region | | |
| SEQ ID NO: 27 | QVQLQQSGAE LARPGASVKM SCKASGYTFT SYTMHWVKQR PGQGLEWIGY INPRSVYTNY | 60 |
| 61F6 heavy chain | NQKFKDKATL TADKSSSTAY MQLSSLTSED SAVYYCARLG GYYDTMDYWG QGTSVTVSS | 119 |
| variable region | | |
| SEQ ID NO: 28 | QVTLKESGPG ILKPSQTLSL TCSFSGFSLS TSGMGVGWIR QPSGKGLEWL AHIWWDDDKY | 60 |
| 1D8 heavy chain | YSPSLKSQLT ISKDTSRNQV FLKITSLDTA DTATYYCVRS YYYGSSGAMD YWGQGTSVTV | 120 |
| variable region | SS | 122 |
| SEQ ID NO: 29 | EVKLVESGGG FVKPGGSLKL SCAASGFTVR NYAMSWVRQT PEKRLEWVAS ISTGDRSYLP | 60 |
| 17F10 heavy | DSMKGRFTIS RDNARNILYL QMSSLRSEDT AIYYCQRYFD FDSFAFWGQG TLVTVSA | 117 |
| chain variable | | |
| region | | |
| SEQ ID NO: 30 | EVQLQESGPS LVKPSQTLSL TCSVTGDSIT SGYWNWIRKF PGNKLEYMGY ISYSGSTYYN | 60 |
| 35D8 heavy chain | PSLRGRISIT RDTSKSQYYL QLSSVTTEDT ATYYCSRRHL GSGYGWFAYW GQGTLVTVSA | 120 |
| variable region | | |
| SEQ ID NO: 31 | EVQLQESGPS LVKPSQTLSL TCSVTGDSIT SGYWNWIRKF PGNKFEYMGF ISYSGNTYYN | 60 |
| 49A1 heavy chain | PSLRSRISIT RDTSKNQYFL HLNSVTTEDT ATYYCSRRHL ISGYGWFAYW GQGTLVTVSA | 120 |
| variable region | | |
| SEQ ID NO: 32 | QVTLKESGPG ILQPSQTLSL TCTFSGFSLS TYGVGVGWIR QPSGKGLEWL ANIWWDDDNY | 60 |
| 9E5 heavy chain | YNPSLIHRLT VSKDTSNNQA FLKITNVDTA ETATYYCAQI KEPRDWFFEF WGPGTMVSVS | 120 |
| variable region | S | 121 |
| SEQ ID NO: 33 | QVTLKESGPG ILQPSQTLSL TCTFSGFSLS TYGVGVGWIR QPSGKGLEWL ANIWWDDDKY | 60 |
| 31H6 heavy chain | YNPSLKNRLT ISKDTSNNQA FLKITNVDTA ETATYYCAQI KEPRDWFFEF WGPGTMVSVS | 120 |
| variable region | S | 121 |
| SEQ ID NO: 34 | DIVLTQSPAS LAVSLGQRAT ISCRASESVD NYGVSFMNWF QQKPGQPPKL LIYAASNQGS | 60 |
| 36E5 light chain | GVPARFSGSG SGTDFSLNIH PMEEDDTAMY FCQQTKEVTW TFGGGTKLEI KRA | 113 |
| variable region | | |
| SEQ ID NO: 35 | DVVMTQTPVS LSVSLGNQAS ISCRSSQSLL HSDGNTFLSW YFQKPGQSPQ LLIYLASNRF | 60 |
| 3D6 light chain | SGVSNRFSGS GSGTDFTLKI SRVEPEDLGV YYCFQHTHLP LTFGSGTKLE IKR | 113 |
| variable region | | |
| SEQ ID NO: 36 | QIVLTQSPAL MSASPGEKVT MTCSANSTVN YMYWYQQKPR SSPKPCIYLT SNLASGVPAR | 60 |
| 61G6 light chain | FSGSGSGTSY SLTISSMEAE DAATYYCQQW NSNPPTFGAG TKLELRRA | 108 |
| variable region | | |
| SEQ ID NO: 37 | QIVLTQSPAI MSVSLGERVT VTCTASSSVS SSYFHWYQQK PGSSPKLWIY STSNLASGVP | 60 |
| 6H6 light chain | ARFSGSGSGT SYSLTISTME AEDAATYYCH QYHRSPRTFG GGTKLEIKRA | 110 |
| variable region | | |
| SEQ ID NO: 38 | DIVVTQSPAS LAVSLGQRAT ISCRASESVD NYGISFMNWF QQKPGQPPKL LIYAASNQGS | 60 |
| 61F6 light chain | GVPARFSGSG SGTDFSLNIH PMEEDDTAVY FCQQSKEVPF TFGSGTKLEI KRA | 113 |
| variable region | | |
| SEQ ID NO: 39 | DIVMTQTPLS LPVSLGDQAS ISCRSSQSLV HSDGNTYLHW YLQKPGQSPK LLIYKVSKRF | 60 |
| 1D8 light chain | SGVPDRFSGS GSGTDFTLKI SRVEAEDLGV YFCSQSTHVP PTFGGGTKLE IKRADAAP | 118 |
| variable region | | |
| SEQ ID NO: 40 | DIQMTQTPSS LSASLGDRVT ISCRASQDIN NFLNWYQQKP DGSLKLLIYY TSKLHSGVPS | 60 |
| 17F10 light | RFSGSGSGTD FSLTISNLDQ EDVATYFCQQ GHTLPPTFGG GTKLEVKRAD AAP | 113 |
| chain variable | | |
| region | | |
| SEQ ID NO: 41 | DIVMTQSHKF MSTSVGDRVS ITCKASQDVN TAVAWYQQKP GQSPKLLIYW ASTRHTGVPD | 60 |
| 35D8 light chain | RFTGSGSGTD YALTINSVQA EDLALYYCQQ HSYTPPWTFG GGTKLEIRRA DAAP | 114 |
| variable region | | |
| SEQ ID NO: 42 | VIVMTQSHKF MSTSIGDRVN ITCKASQDVI SAVAWYQQKP GQSPKLLIYW ASTRHTGVPD | 60 |
| 49A1 light chain | RFTGSGSGTD FTLTINSVQA EDRALYYCQQ HSYTPPWTFG GGTNLEIKRA DAAP | 114 |
| variable region | | |
| SEQ ID NO: 43 | DIQMTQTPSS MPASLGERVT IFCRASQGVN NFLTWYQQKP DGTIKPLIFY TSNLQSGVPS | 60 |
| 9E5 light chain | RFSGSGSGTD YSLSISSLEP EDFAMYYCQQ YHGFPNTFGA GTKLELKRAD AAP | 113 |
| variable region | | |
| SEQ ID NO: 44 | DIQMTQTPSS MPASLGERVT IFCRASQGVN NYLTWYQQKP DGTIKPLIFY TSNLQSGVPS | 60 |
| 31H6 light chain | RFSGSGSGTD YSLSISSLEP EDFAMYYCQQ YHGFPNTFGA GTKLELKRAD AAP | 113 |
| variable region | | |
| SEQ ID NO: 45 | QVQLVESGGG VVQPGRSLRL SCAXSGFSLS TSGMGVGWVR QAPGKGLEWV AHIWWDDDKY | 60 |
| humanized 1D8 | YSPSLKSRXT ISXDXSKNTX YLQMNSLRAE DTAVYYCXRS YYYGSSGAMD YWGQGTLVTV | 120 |
| heavy chain | SS | 122 |
| variable region | | |
| SEQ ID NO: 46 | DIVMTQSPLS LPVTPGEPAS ISCRSSQSLV HSDGNTYLHW YLQKPGQSPQ LLIYKVSKRF | 60 |
| humanized 1D8 | SGVPDRFSGS GSGTDFTLKI SRVEAEDVGV YYCSQSTHVP PTFGQGTKVE IKR | 113 |
| light chain | | |
| variable region | | |
| SEQ ID NO: 47 | QVQLVESGGG VVQPGRSLRL SCAASGFTFS DYYMAWVRQA PGKGLEWVAY IHANGGSTYY | 60 |
| humanized 3D6 | RDSVRGRFTI SRDNSKNTLY LQMNSLRAED TAVYYCXXGS FMYAADYYIM DAWGQGTLVT | 120 |
| heavy chain | VSS | 123 |
| variable region | | |
| SEQ ID NO: 48 | DIVMTQSPLS LPVTPGEPAS ISCRSSQSLL HSDGNTFLSW YLQKPGQSPQ LLIYLASNRF | 60 |
| humanized 3D6 | SGVPDRFSGS GSGTDFTLKI SRVEAEDVGV YYCFQHTHLP LTFGQGTKVE IKR | 113 |
| light chain | | |
| variable region | | |
| SEQ ID NO: 49 | QVQLVQSGAE VKKPGASVKV SCKASGYTFS RYWIEWVRQA PGQGLEWXGE ILPGSGSSNY | 60 |
| humanized 6H6 | NEKFKDRXTX TXDTSTSTAY MELRSLRSDD TAVYYCARKV YYYAMDFWGQ GTLVTVSS | 118 |
| heavy chain | | |
| variable region | | |
| SEQ ID NO: 50 | EIVLTQSPGT LSLSPGERAT LSCTASSSVS SSYFHWYQQK PGQAPRLXIY STSNLASGIP | 60 |
| humanized 6H6 | DRFSGSGSGT DXTLTISRLE PEDFAVYYCH QYHRSPRTFG QGTKVEIKR | 109 |
| light chain | | |
| variable region | | |
| SEQ ID NO: 51 | QVQLQESGPG LVKPSETLSL TCTXSGFSLS TYGVGVGWIR QPPGKGLEWX XNIWWDDDNY | 60 |
| humanized 9E5 | YNPSLIHRXT XSXDTSKNQX SLKLSSVTAA DTAVYYCAXI KEPRDWFFEF WGQGTLVTVS | 120 |
| heavy chain | S | 121 |
| variable region | | |
| SEQ ID NO: 52 | DIQMTQSPSS LSASVGDRVT ITCRASQGVN NFLTWYQQKP GKAPKXLIXY TSNLQSGVPS | 60 |
| humanized 9E5 | RFSGSGSGTD XTLTISSLQP EDFATYYCQQ YHGFPNTFGQ GTKVEIKR | 108 |
| light chain | | |
| variable region | | |
| SEQ ID NO: 53 | QVQLQESGPG LVKPSETLSL TCTXSGFSLS TYGVGVGWIR QPPGKGLEWX XNIWWDDDKY | 60 |
| humanized 31H6 | YNPSLKNRXT ISXDTSKNQX SLKLSSVTAA DTAVYYCAXI KEPRDWFFEF WGQGTLVTVS | 120 |
| heavy chain | S | 121 |
| variable region | | |
| SEQ ID NO: 54 | DIQMTQSPSS LSASVGDRVT ITCRASQGVN NYLTWYQQKP GKAPKXLIXY TSNLQSGVPS | 60 |
| humanized 31H6 | RFSGSGSGTD XTLTISSLQP EDFATYYCQQ YHGFPNTFGQ GTKVEIKR | 108 |
| light chain | | |
| variable region | | |
| SEQ ID NO: 55 | QVQLVESGGG VVQPGRSLRL SCAASGFTVR NYAMSWVRQA PGKGLEWVAS ISTGDRSYLP | 60 |
| humanized 17F10 | DSMKGRFTIS RDNSKNTLYL QMNSLRAEDT AVYYCXRYFD FDSFAFWGQG TLVTVSS | 117 |
| heavy chain | | |
| variable region | | |
| SEQ ID NO: 56 | DIQMTQSPSS LSASVGDRVT ITCRASQDIN NFLNWYQQKP GKAPKLLIYY TSKLHSGVPS | 60 |
| humanized 17F10 | RFSGSGSGTD FTLTISSLQP EDFATYYCQQ GHTLPPTFGQ GTKVEIKR | 108 |
| light chain | | |
| variable region | | |
| SEQ ID NO: 57 | QVQLQESGPG LVKPSETLSL TCTVSGDSIT SGYWNWIRQP PGKGLEXXGY ISYSGSTYYN | 60 |
| humanized 35D8 | PSLRGRVTIS XDTSKNQFSL KLSSVTAADT AVYYCXRRHL GSGYGWFAYW GQGTLVTVSS | 120 |
| heavy chain | | |
| variable region | | |
| SEQ ID NO: 58 | DIVMTQSPDS LAVSLGERAT INCKASQDVN TAVAWYQQKP GQPPKLLIYW ASTRHTGVPD | 60 |
| humanized 35D8 | RFSGSGSGTD XTLTISSLQA EDVAVYYCQQ HSYTPPWTFG QGTKVEIKR | 109 |
| light chain | | |
| variable region | | |
| SEQ ID NO: 59 | QVQLVESGGG VVQPGRSLRL SCAASGFTFS SYAMSWVRQA PGKGLEWVAS ISSGGTTYYP | 60 |
| humanized 36E5 | DSVKGRFTIS RDNSKNTLYL QMNSLRAEDT AVYYCARVGG YYDSMDYWGQ GTLVTVSS | 118 |
| heavy chain | | |
| variable region | | |
| SEQ ID NO: 60 | EIVLTQSPGT LSLSPGERAT LSCRASESVD XYGVSFMNWY QQKPGQAPRL LIYAASXQGS | 60 |
| humanized 36E5 | GIPDRFSGSG SGTDFTLTIS RLEPEDFAVY YCQQTKEVTW TFGQGTKVEI KR | 112 |
| light chain | | |
| variable region | | |
| SEQ ID NO: 61 | QVQLQESGPG LVKPSETLSL TCTVSGDSIT SGYWNWIRQP PGKGLEXXGF ISYSGNTYYN | 60 |
| humanized 49A1 | PSLRSRXTIS XDTSKNQXSL KLSSVTAADT AVYYCXRRHL ISGYGWFAYW GQGTLVTVSS | 120 |
| heavy chain | | |
| variable region | | |
| SEQ ID NO: 62 | XIVMTQSPDS LAVSLGERAT INCKASQDVI SAVAWYQQKP GQPPKLLIYW ASTRHTGVPD | 60 |
| humanized 49A1 | RFSGSGSGTD FTLTISSLQA EDVAVYYCQQ HSYTPPWTFG QGTKVEIKR | 109 |
| light chain | | |
| variable region | | |
| SEQ ID NO: 63 | QVQLVQSGAE VKKPGASVKV SCKASGYTFT SYTMHWVRQA PGQGLEWXGY INPRSVYTNY | 60 |
| humanized 61F6 | NQKFKDRXTX TXDXSTSTAY MELRSLRSDD TAVYYCARLG GYYDTMDYWG QGTLVTVSS | 119 |
| heavy chain | | |
| variable region | | |
| SEQ ID NO: 64 | DIQMTQSPSS LSASVGDRVT ITCRASESVD NYGISFMNWY QQKPGKAPKL LIYAASNQGS | 60 |
| humanized 61F6 | GVPSRFSGSG SGTDFTLTIS SLQPEDFATY YCQQSKEVPF TFGQGTKVEI KR | 112 |
| light chain | | |
| variable region | | |
| SEQ ID NO: 65 | QVQLQESGPG LVKPSETLSL TCTVSGYSIT SDYAWNWIRQ PPGKGLEWXG YISYSGSTRY | 60 |
| humanized 61G6 | NPSLKSRXTI SXDTSKNQFS LKLSSVTAAD TAVYYCARQL GLRFFDYWGQ GTLVTVSS | 118 |
| heavy chain | | |
| variable region | | |
| SEQ ID NO: 66 | EIVLTQSPGT LSLSPGERAT LSCSANSTVN YMYWYQQKPG QAPRXXIYLT SNLASGIPDR | 60 |
| humanized 61G6 | FSGSGSGTDF TLTISRLEPE DFAVYYCQQW NSNPPTFGQG TKVEIKR | 107 |
| light chain | | |
| variable region | | |
| SEQ ID NO: 67 | GFTFSSYAMS | 10 |
| 36E5 heavy chain | | |
| CDR1 | | |
| SEQ ID NO: 68 | GFTFSDYYMA | 10 |
| 3D6 heavy chain | | |
| CDR1 | | |
| SEQ ID NO: 69 | GYSITSDYAW N | 11 |
| 61G6 heavy chain | | |
| CDR1 | | |
| SEQ ID NO: 70 | GYTFSRYWIE | 10 |
| 6H6 heavy chain | | |
| CDR1 | | |
| SEQ ID NO: 71 | GYTFTSYTMH | 10 |
| 61F6 heavy chain | | |
| CDR1 | | |
| SEQ ID NO: 72 | GFSLSTSGMG VG | 12 |
| 1D8 heavy chain | | |
| CDR1 | | |
| SEQ ID NO: 73 | GFTVRNYAMS | 10 |
| 17F10 heavy | | |
| chain CDR1 | | |
| SEQ ID NO: 74 | GDSITSGYWN | 10 |
| 35D8 heavy chain | | |
| CDR1 | | |
| SEQ ID NO: 75 | GDSITSGYWN | 10 |
| 49A1 heavy chain | | |
| CDR1 | | |
| SEQ ID NO: 76 | GFSLSTYGVG VG | 12 |
| 9E5 heavy chain | | |
| CDR1 | | |
| SEQ ID NO: 77 | GFSLSTYGVG VG | 12 |
| 31H6 heavy chain | | |
| CDR1 | | |
| SEQ ID NO: 78 | SISSGGTTYY PDSVKG | 16 |
| 36E5 heavy chain | | |
| CDR2 | | |
| SEQ ID NO: 79 | YIHANGGSTY YRDSVRG | 17 |
| 3D6 heavy chain | | |
| CDR2 | | |
| SEQ ID NO: 80 | YISYSGSTRY NPSLKS | 16 |
| 61G6 heavy chain | | |
| CDR2 | | |
| SEQ ID NO: 81 | EILPGSGSSN YNEKFKD | 17 |
| 6H6 heavy chain | | |
| CDR2 | | |
| SEQ ID NO: 82 | YINPRSVYTN YNQKFKD | 17 |
| 61F6 heavy chain | | |
| CDR2 | | |
| SEQ ID NO: 83 | HIWWDDDKYY SPSLKS | 16 |
| 1D8 heavy chain | | |
| CDR2 | | |
| SEQ ID NO: 84 | SISTGDRSYL PDSMKG | 16 |
| 17F10 heavy | | |
| chain CDR2 | | |
| SEQ ID NO: 85 | YISYSGSTYY NPSLRG | 16 |
| 35D8 heavy chain | | |
| CDR2 | | |
| SEQ ID NO: 86 | FISYSGNTYY NPSLRS | 16 |
| 49A1 heavy chain | | |
| CDR2 | | |
| SEQ ID NO: 87 | NIWWDDDNYY NPSLIH | 16 |
| 9E5 heavy chain | | |
| CDR2 | | |
| SEQ ID NO: 88 | NIWWDDDKYY NPSLKN | 16 |
| 31H6 heavy chain | | |
| CDR2 | | |
| SEQ ID NO: 89 | VGGYYDSMDY | 10 |
| 36E5 heavy chain | | |
| CDR3 | | |
| SEQ ID NO: 90 | GSFMYAADYY IMDA | 14 |
| 3D6 heavy chain | | |
| CDR3 | | |
| SEQ ID NO: 91 | QLGLRFFDY | 9 |
| 61G6 heavy chain | | |
| CDR3 | | |
| SEQ ID NO: 92 | KVYYYAMDF | 9 |
| 6H6 heavy chain | | |
| CDR3 | | |
| SEQ ID NO: 93 | LGGYYDTMDY | 10 |
| 61F6 heavy chain | | |
| CDR3 | | |
| SEQ ID NO: 94 | SYYYGSSGAM DYWGQGTSVT VSS | 23 |
| 1D8 heavy chain | | |
| CDR3 | | |
| SEQ ID NO: 95 | YFDFDSFAFW GQGTLVTVSA | 20 |
| 17F10 heavy | | |
| chain CDR3 | | |
| SEQ ID NO: 96 | RHLGSGYGWF AYWGQGTLVT VSA | 23 |
| 35D8 heavy chain | | |
| CDR3 | | |
| SEQ ID NO: 97 | RHLISGYGWF AYWGQGTLVT VSA | 23 |
| 49A1 heavy chain | | |
| CDR3 | | |
| SEQ ID NO: 98 | IKEPRDWFFE FWGPGTMVSV SS | 22 |
| 9E5 heavy chain | | |
| CDR3 | | |
| SEQ ID NO: 99 | IKEPRDWFFE FWGPGTMVSV SS | 22 |
| 31H6 heavy chain | | |
| CDR3 | | |
| SEQ ID NO: 100 | RASESVDNYG VSFMN | 15 |
| 36E5 light chain | | |
| CDR1 | | |
| SEQ ID NO: 101 | RSSQSLLHSD GNTFLS | 16 |
| 3D6 light chain | | |
| CDR1 | | |
| SEQ ID NO: 102 | SANSTVNYMY | 10 |
| 61G6 light chain | | |
| CDR1 | | |
| SEQ ID NO: 103 | TASSSVSSSY FH | 12 |
| 6H6 light chain | | |
| CDR1 | | |
| SEQ ID NO: 104 | RASESVDNYG ISFMN | 15 |
| 61F6 light chain | | |
| CDR1 | | |
| SEQ ID NO: 105 | RSSQSLVHSD GNTYLH | 16 |
| 1D8 light chain | | |
| CDR1 | | |
| SEQ ID NO: 106 | RASQDINNFL N | 11 |
| 17F10 light | | |
| chain CDR1 | | |
| SEQ ID NO: 107 | KASQDVNTAV A | 11 |
| 35D8 light chain | | |
| CDR1 | | |
| SEQ ID NO: 108 | KASQDVISAV A | 11 |
| 49A1 light chain | | |
| CDR1 | | |
| SEQ ID NO: 109 | RASQGVNNFL T | 11 |
| 9E5 light chain | | |
| CDR1 | | |
| SEQ ID NO: 110 | RASQGVNNYL T | 11 |
| 31H6 light chain | | |
| CDR1 | | |
| SEQ ID NO: 111 | AASNQGS | 7 |
| 36E5 light chain | | |
| CDR2 | | |
| SEQ ID NO: 112 | LASNRFS | 7 |
| 3D6 light chain | | |
| CDR2 | | |
| SEQ ID NO: 113 | LTSNLAS | 7 |
| 61G6 light chain | | |
| CDR2 | | |
| SEQ ID NO: 114 | STSNLAS | 7 |
| 6H6 light chain | | |
| CDR2 | | |
| SEQ ID NO: 115 | AASNQGS | 7 |
| 61F6 light chain | | |
| CDR2 | | |
| SEQ ID NO: 116 | KVSKRFS | 7 |
| 1D8 light chain | | |
| CDR2 | | |
| SEQ ID NO: 117 | YTSKLHS | 7 |
| 17F10 light | | |
| chain CDR2 | | |
| SEQ ID NO: 118 | WASTRHT | 7 |
| 35D8 light chain | | |
| CDR2 | | |
| SEQ ID NO: 119 | WASTRHT | 7 |
| 49A1 light chain | | |
| CDR2 | | |
| SEQ ID NO: 120 | YTSNLQS | 7 |
| 9E5 light chain | | |
| CDR2 | | |
| SEQ ID NO: 121 | YTSNLQS | 7 |
| 31H6 light chain | | |
| CDR2 | | |
| SEQ ID NO: 122 | QQTKEVTWT | 9 |
| 36E5 light chain | | |
| CDR3 | | |
| SEQ ID NO: 123 | FQHTHLPLT | 9 |
| 3D6 light chain | | |
| CDR3 | | |
| SEQ ID NO: 124 | QQWNSNPPT | 9 |
| 61G6 light chain | | |
| CDR3 | | |
| SEQ ID NO: 125 | HQYHRSPRT | 9 |
| 6H6 light chain | | |
| CDR3 | | |
| SEQ ID NO: 126 | QQSKEVPFT | 9 |
| 61F6 light chain | | |
| CDR3 | | |
| SEQ ID NO: 127 | SQSTHVPPT | 9 |
| 1D8 light chain | | |
| CDR3 | | |
| SEQ ID NO: 128 | QQGHTLPPT | 9 |
| 17F10 light | | |
| chain CDR3 | | |
| SEQ ID NO: 129 | QQHSYTPPWT | 10 |
| 35D8 light chain | | |
| CDR3 | | |
| SEQ ID NO: 130 | QQHSYTPPWT | 10 |
| 49A1 light chain | | |
| CDR3 | | |
| SEQ ID NO: 131 | QQYHGFPNT | 9 |
| 9E5 light chain | | |
| CDR3 | | |
| SEQ ID NO: 132 | QQYHGFPNT | 9 |
| 31H6 light chain | | |
| CDR3 | | |
| SEQ ID NO: 133 | EVKLVESGGG LVKPGGSLKL SCGASGFTIS SYAMSWVRQS PEKRLEWVAI ISTGGSTYYP | 60 |
| 2155 variable | DSVRGRFTIS RDNARNSLYL QMSSLRSEDT AMYYCARVGG YYDSMDHWGQ GTSVTVSS | 118 |
| heavy chain | | |
| SEQ ID NO: 134 | DIVLTQSPAS LAVSLGQRAT ISCRASETVD NYGISFMNWF QQKPGQSPKL LIYAASNQGS | 60 |
| 2155 variable | GVPARFSGSG SGTDFSLNIH PMEEDDTAMY FCQQSKEVPW TFGGGTKLEI K | 111 |
| light chain | | |
| SEQ ID NO: 135 | QVTLVESGGG LVKPGGSLTL SCGASGFTIS SYAMSWVRQS PGKALEWVAI ISTGGSTYYP | 60 |
| 2155 humanized | DSVRGRFTIS RDNAKNSLYL TMSSLDSVDT AMYYCARVGG YYDSMDHWGQ GTSVT | 115 |
| (HC1) heavy | | |
| chain | | |
| SEQ ID NO: 136 | QVTLVESGGG LVKPGGSLTL SCGASGFTIS SYAMSWVRQS PGKALEWVAI ISTGGSTYYP | 60 |
| 2155 humanized | DSVRGRFTIS RDNAKNSLYL TMSSLDSVDT ATYYCARVGG YYDSMDHWGQ GTSVT | 115 |
| (HC2) heavy | | |
| chain | | |
| SEQ ID NO: 137 | QVTLVESGGG LVKPGGSLTL SCGASGFTIS SYAMSWVRQS PGKALEWVAI ISTGGSTYYP | 60 |
| 2155 humanized | DKFRGRFTIS RDNAKNSLYL TMSSLRSEDT ATYYCARVGG YYDSMDHWGQ GTSVT | 115 |
| (HC3a) heavy | | |
| chain | | |
| SEQ ID NO: 138 | QVTLKESGGG LVKPGGSLTL SCGASGFTIS SYAMSWVRQS PGKALEWVAI ISTGGSTYYP | 60 |
| humanized (HC3b) | DKFRGRFTIS RDNAKNSLYL TMSSLRSEDT ATYYCARVGG YYDSMDHWGQ GTSVT | 115 |
| heavy chain | | |
| SEQ ID NO: 139 | EVQLVESGGG LIQPGGSLKL SCAASGFTIS SYAMSWVRQA PGKGLEWVAI ISTGGSTYYA | 60 |
| humanized (HC4) | DSVKGRFTIS RDNSKNTLYL QMNSLRAEDT AVYYCARVGG YYDSMDHWGQ GTSVT | 115 |
| heavy chain | | |
| SEQ ID NO: 140 | DIVLTQSPAS LAASVGDRAT ISCRASETVD NYGISFMNWF QQKPGKSPKL LIYAASNQGS | 60 |
| 2155 humanized | GVPARFSGSG SGTDFSLNIH PMQPDDTATY FCQQSKEVPW TFGGGTKLE | 109 |
| (LC1) light | | |
| chain | | |
| SEQ ID NO: 141 | DIVLTQSPAS LSASVGDRAT ISCRASETVD NYGISFMNWF QQKPGQSPKL LIYAASNQGS | 60 |
| 2155 humanized | GVPARFSGSG SGTDFSLTIS PMQPDDTATY YCQQSKEVPW TFGGGTKLE | 109 |
| (LC2a) light | | |
| chain | | |
| SEQ ID NO: 142 | DIVLTQSPAS LSASVGDRAT ISCRASETVD NYGISYMNWF QQKPGQSPKL LIYAASNQGS | 60 |
| 2155 humanized | GVPARFSGSG SGTDFSLTIS PMQPDDTATY YCQQSKEVPW TFGGGTKLE | 109 |
| (LC2b) light | | |
| chain | | |
| SEQ ID NO: 143 | DIVLTQSPAS LAVSPGQRAT ITCRASETVD NYGISFMNWF QQKPGQPPKL LIYAASNQGS | 60 |
| 2155 humanized | GVPARFSGSG SGTDFTLTIN PVEADDTANY YCQQSKEVPW TFGQGTKVE | 109 |
| (LC3) light | | |
| chain | | |
| SEQ ID NO: 144 | EVQLQQSGTV LARPGASVKM SCEASGYSFT TYWMHWIKQR PGQGLEWIGA IYPGNSDTGY | 60 |
| 698 variable | NQKFKGKAKL TAVTSATTAY MELSSLTDED SAVYYCTRTS TYPHFDYWGQ GTTLTVSS | 118 |
| heavy chain | | |
| SEQ ID NO: 145 | DILLTQSPAI LSVSPGERVS FSCRASQSIG TSIHWYQQRT NGSPRLLIKY ASESISGIPS | 60 |
| 698 variable | RFSGSGSGTD FTLNINSVES EDIADYYCQQ SNNWPLTFGA GTKLELK | 107 |
| light chain | | |
| SEQ ID NO: 146 | EVQLQQSGTV LARPGASVKM SCEASGYSFT TYWMHWIKQR PGQGLEWIGA IYPGNSDTGY | 60 |
| 706 variable | NQKFKGKAKL TAVTSASTAY MELSSLTNED SAVYYCTRTS TYPHFDYWGQ GTTLTVSS | 118 |
| heavy chain | | |
| SEQ ID NO: 147 | DILLTQSPAI LSVSPGERVS FSCRASQSIG TSIHWYQQRT NGSPRLLIKY ASESISGIPS | 60 |
| 706 variable | RFSGSGSGTD FTLNINSVES EDIADYYCQQ TNNWPLTFGA GTKLELK | 107 |
| light chain | | |
| SEQ ID NO: 148 | EVQLQQSGTV LARPGASVKM SCETSGYSFT TYWIHWIKQR PGQGLEWIAT IYPGNSDAGY | 60 |
| 827 variable | NQKFRGKAKL TAVTSASTAY MELSSLTNED SAVYYCTRSS TYPHFDYWGQ GTTLTVSS | 118 |
| heavy chain | | |
| SEQ ID NO: 149 | DILLTQSPAI LSVSPGERVS FSCRASQSIG TSIHWYQQRT NDSPRLLIKY ASESISGIPS | 60 |
| 827 variable | RFSGSGSGTD FTLNINSVES EDIADYYCQQ TNNWPLTFGA GTKLELK | 107 |
| light chain | | |
| SEQ ID NO: 150 | QVQVQQSGPE LVKPGASVRI SCKASDYTFT NYYIHWVRQR PGQGLEWLGW IYPGKGYTNY | 60 |
| 1718 variable | NEKFKGKATL TADKSSSTAY MQFSSLTSED SAVYFCASGY GNYYFPYWGQ GTLVTVSA | 118 |
| heavy chain | | |
| SEQ ID NO: 151 | IQMTQSSSYL SVSLGGRVTI TCKASDHIKN WLAWYQQKPG NVPRLLMSAA TSLETGFPSR | 60 |
| 1718 variable | FSGSGSGKDF TLTITSLQTE DVATYYCQQY WSTPWTFGGG TKLEIK | 106 |
| light chain | | |
| SEQ ID NO: 152 | VGGYYDSMDH | 10 |
| 2155 heavy chain | | |
| CDR3 | | |
| SEQ ID NO: 153 | IISTGGSTY | 9 |
| 2155 heavy chain | | |
| CDR2 | | |
| SEQ ID NO: 154 | GFTISSYAMS | 10 |
| 2155 heavy chain | | |
| CDR1 | | |
| SEQ ID NO: 155 | QQSKEVPWT | 9 |
| 2155 light chain | | |
| CDR3 | | |
| SEQ ID NO: 156 | AASNQGS | 7 |
| 2155 light chain | | |
| CDR2 | | |
| SEQ ID NO: 157 | RASETVDNYG ISFMN | 15 |
| 2155 light chain | | |
| CDR1 | | |
| SEQ ID NO: 158 | TSTYPHFDY | 9 |
| 698 and 706 | | |
| heavy chain CDR3 | | |
| SEQ ID NO: 159 | AIYPGNSDTG | 10 |
| 698 and 706 | | |
| heavy chain CDR2 | | |
| SEQ ID NO: 160 | GYSFTTYWMH | 10 |
| 698 and 706 | | |
| heavy chain CDR1 | | |
| SEQ ID NO: 161 | QQSNNWPLT | 9 |
| 698 light chain | | |
| CDR3 | | |
| SEQ ID NO: 162 | KYASESIS | 8 |
| 698, 706, 827, | | |
| and 1649 light | | |
| chain CDR2 | | |
| SEQ ID NO: 163 | RASQSIGTSI H | 11 |
| 698, 706, 827, | | |
| and 1649 light | | |
| chain CDR1 | | |
| SEQ ID NO: 164 | QQTNNWPLT | 9 |
| 706, 827, and | | |
| 1649 light chain | | |
| CDR3 | | |
| SEQ ID NO: 165 | SSTYPHFDY | 9 |
| 827 and 1649 | | |
| heavy chain CDR3 | | |
| SEQ ID NO: 166 | TIYPGNSDAG | 10 |
| 827 heavy chain | | |
| CDR2 | | |
| SEQ ID NO: 167 | AIYPGNSDAG | 10 |
| 1649 heavy chain | | |
| CDR2 | | |
| SEQ ID NO: 168 | GYGNYYFPY | 9 |
| 1718 heavy chain | | |
| CDR3 | | |
| SEQ ID NO: 169 | WIYPGKGYTN | 10 |
| 1718 heavy chain | | |
| CDR2 | | |
| SEQ ID NO: 170 | DYTFTNYYI | 9 |
| 1718 heavy chain | | |
| CDR1 | | |
| SEQ ID NO: 171 | QQTWSTPWT | 9 |
| 1718 light chain | | |
| CDR3 | | |
| SEQ ID NO: 172 | AATSLET | 7 |
| 1718 light chain | | |
| CDR2 | | |
| SEQ ID NO: 173 | KASDHIKNWL A | 11 |
| 1718 light chain | | |
| CDR1 | | |
| SEQ ID NO: 174 | GYSFTTYWIH | 10 |
| 827 and 1649 | | |
| heavy chain CDR1 | | |
| SEQ ID NO: 175 | QVQLVESGGG VVQPGRSLRL SCAASGFTFS SYGMHWVRQA PGKGLEWVTV IWYEGSNKYY | 60 |
| 1D7 heavy chain | ADSVKGRFTI SRDNSKNTLY LQMNSLRAED TAVYYCARGG QLGKYYYYGM DVWGQGTTVT | 120 |
| | VSSASTKGPS VFPLAPSSKS TSGGTAALGC LVKDYFPEPV TVSWNSGALT SGVHTFPAVL | 180 |
| | QSSGLYSLSS VVTVPSSSLG TQTYICNVNH KPSNTKVDKR VEPKSCDKTH TCPPCPAPEL | 240 |
| | LGGPSVFLFP PKPKDTLMIS RTPEVTCVVV DVSHEDPEVK FNWYVDGVEV HNAKTKPREE | 300 |
| | QYNSTYRVVS VLTVLHQDWL NGKEYKCKVS NKALPAPIEK TISKAKGQPR EPQVYTLPPS | 360 |
| | REEMTKNQVS LTCLVKGFYP SDIAVEWESN GQPENNYKTT PPVLDSDGSF FLYSKLTVDK | 420 |
| | SRWQQGNVFS CSVMHEALHN HYTQKSLSLS PGK | 453 |
| SEQ ID NO: 176 | DIQMTQSPSS LSASVGDRVT ITCRASQGIR NDLGWYQQKP GKAPKRLIYD ASSLQSGVPS | 60 |
| 1D7 light chain | RFSGSGSGTE FTLTISSLQP EDFATYYCLQ HNNYPWTFGQ GTKVEIKRTV AAPSVFIFPP | 120 |
| | SDEQLKSGTA SVVCLLNNFY PREAKVQWKV DNALQSGNSQ ESVTEQDSKD STYSLSSTLT | 180 |
| | LSKADYEKHK VYACEVTHQG LSSPVTKSFN RGEC | 214 |
| SEQ ID NO: 177 | QVQLVESGGG VVQPGRSLRL SCAASGFTFS SYGMHWVRQA PGKGLEWVTV IWYEGSNKYY | 60 |
| 1D7 variable | ADSVKGRFTI SRDNSKNTLY LQMNSLRAED TAVYYCARGG QLGKYYYYGM DVWGQGTTVT | 120 |
| heavy chain | VSS | 123 |
| SEQ ID NO: 178 | DIQMTQSPSS LSASVGDRVT ITCRASQGIR NDLGWYQQKP GKAPKRLIYD ASSLQSGVPS | 60 |
| 1D7 variable | RFSGSGSGTE FTLTISSLQP EDFATYYCLQ HNNYPWTFGQ GTKVEIKR | 108 |
| light chain | | |
| SEQ ID NO: 179 | SYGMH | 5 |
| 1D7 heavy chain | | |
| CDR1 | | |
| SEQ ID NO: 180 | VIWYEGSNKY YADSVKG | 17 |
| 1D7 heavy chain | | |
| CDR2 | | |
| SEQ ID NO: 181 | GGQLGKYYYY GMDV | 14 |
| 1D7 heavy chain | | |
| CDR3 | | |
| SEQ ID NO: 182 | RASQGIRNDL G | 11 |
| 1D7 light chain | | |
| CDR1 | | |
| SEQ ID NO: 183 | DASSLQS | 7 |
| 1D7 light chain | | |
| CDR2 | | |
| SEQ ID NO: 184 | LQHNNYPWT | 9 |
| 33C9 light chain | | |
| CDR3 | | |
| SEQ ID NO: 185 | QVQVVESGGG VVQPGRSLRL SCAASGFTFS SYGMHWVRQA PGKGLEWVSV IWYEGSNKYY | 60 |
| 33C9 heavy chain | ADSVKGRFTI SRDNSKNTLY LQMNSLRAED TAVYYCARGG LLGYYYYYGM DVWGQGTTVT | 120 |
| | VSSASTKGPS VFPLAPSSKS TSGGTAALGC LVKDYFPEPV TVSWNSGALT SGVHTFPAVL | 180 |
| | QSSGLYSLSS VVTVPSSSLG TQTYICNVNH KPSNTKVDKK VEPKSCDKTH TCPPCPAPEL | 240 |
| | LGGPSVFLFP PKPKDTLMIS RTPEVTCVVV DVSHEDPEVK FNWYVDGVEV HNAKTKPREE | 300 |
| | QYNSTYRVVS VLTVLHQDWL NGKEYKCKVS NKALPAPIEK TISKAKGQPR EPQVYTLPPS | 360 |
| | REEMTKNQVS LTCLVKGFYP SDIAVEWESN GQPENNYKTT PPVLDSDGSF FLYSKLTVDK | 420 |
| | SRWQQGNVFS CSVMHEALHN HYTQKSLSLS PGK | 453 |
| SEQ ID NO: 186 | DIQMTQSPSS LSASVGDRVT ITCRASQGIR NDLGWYQQKP GKAPKRLIYD ASSLQSGVPS | 60 |
| 33C9 light chain | RFSGSGSGTE FTLTISSLQP EDFATYYCLQ HHSYPWTFGQ GTKVEIKRTV AAPSVFIFPP | 120 |
| | SDEQLKSGTA SVVCLLNNFY PREAKVQWKV DNALQSGNSQ ESVTEQDSKD STYSLSSTLT | 180 |
| | LSKADYEKHK VYACEVTHQG LSSPVTKSFN RGEC | 214 |
| SEQ ID NO: 187 | QVQVVESGGG VVQPGRSLRL SCAASGFTFS SYGMHWVRQA PGKGLEWVSV IWYEGSNKYY | 60 |
| 33C9 variable | ADSVKGRFTI SRDNSKNTLY LQMNSLRAED TAVYYCARGG LLGYYYYYGM DVWGQGTTVT | 120 |
| heavy chain | VSS | 123 |
| SEQ ID NO: 188 | DIQMTQSPSS LSASVGDRVT ITCRASQGIR NDLGWYQQKP GKAPKRLIYD ASSLQSGVPS | 60 |
| 33C9 variable | RFSGSGSGTE FTLTISSLQP EDFATYYCLQ HHSYPWTFGQ GTKVEIKR | 108 |
| light chain | | |
| SEQ ID NO: 189 | SYGMH | 5 |
| 33C9 heavy chain | | |
| CDR1 | | |
| SEQ ID NO: 190 | VIWYEGSNKY YADSVKG | 17 |
| 33C9 heavy chain | | |
| CDR2 | | |
| SEQ ID NO: 191 | GGLLGYYYYY GMDV | 14 |
| 33C9 heavy chain | | |
| CDR3 | | |
| SEQ ID NO: 192 | RASQGIRNDL G | 11 |
| 33C9 light chain | | |
| CDR1 | | |
| SEQ ID NO: 193 | DASSLQS | 7 |
| 33C9 light chain | | |
| CDR2 | | |
| SEQ ID NO: 194 | LQHHSYPWT | 9 |
| 33C9 light chain | | |
| CDR3 | | |
| SEQ ID NO: 195 | QVQLVESGGG VVQPGRSLRL SCAASGFTFS NYGMHWVRQA PGKGLEWVAV IWYVGSNKYY | 60 |
| 33F6 heavy chain | ADSVKGRFTI SRDNSKNTLY LQMNSLRAED TAVYYCARGG ELRLYYYYGM DVWGQGTTVT | 120 |
| | VSSASTKGPS VFPLAPSSKS TSGGTAALGC LVKDYFPEPV TVSWNSGALT SGVHTFPAVL | 180 |
| | QSSGLYSLSS VVTVPSSSLG TQTYICNVNH KPSNTKVDKK VEPKSCDKTH TCPPCPAPEL | 240 |
| | LGGPSVFLFP PKPKDTLMIS RTPEVTCVVV DVSHEDPEVK FNWYVDGVEV HNAKTKPREE | 300 |
| | QYNSTYRVVS VLTVLHQDWL NGKEYKCKVS NKALPAPIEK TISKAKGQPR EPQVYTLPPS | 360 |
| | REEMTKNQVS LTCLVKGFYP SDIAVEWESN GQPENNYKTT PPVLDSDGSF FLYSKLTVDK | 420 |
| | SRWQQGNVFS CSVMHEALHN HYTQKSLSLS PGK | 453 |
| SEQ ID NO: 196 | DIQMTQSPSS LSASVGDRVT ITCRASQGIR NDLGWYQQKP GKAPKRLIYA ASSLQSGVPS | 60 |
| 33F6 light chain | RFSGSGSGTE FTLTVSSLQP EDFATYYCLQ LNSYPWTFGQ GTKVEIKRTV AAPSVFIFPP | 120 |
| | SDEQLKSGTA SVVCLLNNFY PREAKVQWKV DNALQSGNSQ ESVTEQDSKD STYSLSSTLT | 180 |
| | LSKADYEKHK VYACEVTHQG LSSPVTKSFN RGEC | 214 |
| SEQ ID NO: 197 | QVQLVESGGG VVQPGRSLRL SCAASGFTFS NYGMHWVRQA PGKGLEWVAV IWYVGSNKYY | 60 |
| 33F6 variable | ADSVKGRFTI SRDNSKNTLY LQMNSLRAED TAVYYCARGG ELRLYYYYGM DVWGQGTTVT | 120 |
| heavy chain | VSS | 123 |
| SEQ ID NO: 198 | DIQMTQSPSS LSASVGDRVT ITCRASQGIR NDLGWYQQKP GKAPKRLIYA ASSLQSGVPS | 60 |
| 33F6 variable | RFSGSGSGTE FTLTVSSLQP EDFATYYCLQ LNSYPWTFGQ GTKVEIKR | 108 |
| light chain | | |
| SEQ ID NO: 199 | NYGMH | 5 |
| 33F6 heavy chain | | |
| CDR1 | | |
| SEQ ID NO: 200 | VIWYVGSNKY YADSVKG | 17 |
| 33F6 heavy chain | | |
| CDR2 | | |
| SEQ ID NO: 201 | GGELRLYYYY GMDV | 14 |
| 33F6 heavy chain | | |
| CDR3 | | |
| SEQ ID NO: 202 | RASQGIRNDL G | 11 |
| 33F6 light chain | | |
| CDR1 | | |
| SEQ ID NO: 203 | AASSLQS | 7 |
| 33F6 light chain | | |
| CDR2 | | |
| SEQ ID NO: 204 | LQLNSYPWT | 9 |
| 33F6 light chain | | |
| CDR3 | | |
| SEQ ID NO: 205 | QVQLVESGGG VVQPGRSLRL SCAASGFTFS SYGMHWVRQA PGKGLEWVAV IWYEGSNKYY | 60 |
| 34G4 heavy chain | ADSVKGRFTI SRDNSKNTLY LQMNSLRAED TAVYYCARGG QLGYYYYYGM DVWGQGTTVT | 120 |
| | VSSASTKGPS VFPLAPSSKS TSGGTAALGC LVKDYFPEPV TVSWNSGALT SGVHTFPAVL | 180 |
| | QSSGLYSLSS VVTVPSSSLG TQTYICNVNH KPSNTKVDKK VEPKSCDKTH TCPPCPAPEL | 240 |
| | LGGPSVFLFP PKPKDTLMIS RTPEVTCVVV DVSHEDPEVK FNWYVDGVEV HNAKTKPREE | 300 |
| | QYNSTYRVVS VLTVLHQDWL NGKEYKCKVS NKALPAPIEK TISKAKGQPR EPQVYTLPPS | 360 |
| | REEMTKNQVS LTCLVKGFYP SDIAVEWESN GQPENNYKTT PPVLDSDGSF FLYSKLTVDK | 420 |
| | SRWQQGNVFS CSVMHEALHN HYTQKSLSLS PGK | 453 |
| SEQ ID NO: 206 | DIQMTQSPSS LSASVGDRVT ITCRASQGIR NDLGWYQQKP GKAPKRLIYD ASSLQSGVPS | 60 |
| 34G4 light chain | RFSGSGSGTD FTLTISSLQP EDFATYYCLQ LNSYPWTFGQ GTKVEIKRTV AAPSVFIFPP | 120 |
| | SDEQLKSGTA SVVCLLNNFY PREAKVQWKV DNALQSGNSQ ESVTEQDSKD STYSLSSTLT | 180 |
| | LSKADYEKHK VYACEVTHQG LSSPVTKSFN RGEC | 214 |
| SEQ ID NO: 207 | QVQLVESGGG VVQPGRSLRL SCAASGFTFS SYGMHWVRQA PGKGLEWVAV IWYEGSNKYY 60 | |
| 34G4 variable | ADSVKGRFTI SRDNSKNTLY LQMNSLRAED TAVYYCARGG QLGYYYYYGM DVWGQGTTVT | 120 |
| heavy chain | VSS | 123 |
| SEQ ID NO: 208 | DIQMTQSPSS LSASVGDRVT ITCRASQGIR NDLGWYQQKP GKAPKRLIYD ASSLQSGVPS | 60 |
| 34G4 variable | RFSGSGSGTD FTLTISSLQP EDFATYYCLQ LNSYPWTFGQ GTKVEIKR | 108 |
| light chain | | |
| SEQ ID NO: 209 | SYGMH | 5 |
| 34G4 heavy chain | | |
| CDR1 | | |
| SEQ ID NO: 210 | VIWYEGSNKY YADSVKG | 17 |
| 34G4 heavy chain | | |
| CDR2 | | |
| SEQ ID NO: 211 | GGQLGYYYYY GMDV | 14 |
| 34G4 heavy chain | | |
| CDR3 | | |
| SEQ ID NO: 212 | RASQGIRNDL G | 11 |
| 34G4 light chain | | |
| CDR1 | | |
| SEQ ID NO: 213 | DASSLQS | 7 |
| 34G4 light chain | | |
| CDR2 | | |
| SEQ ID NO: 214 | LQLNSYPWT | 9 |
| 34G4 light chain | | |
| CDR3 | | |
| SEQ ID NO: 215 | QVQLVESGGG VVQPGRSLRL SCAASGFTFS SYGMHWVRQA PGKGLEWVAV IWYAGSNKYY | 60 |
| 35B10 heavy | ADSVKGRFTI SRDNSKNTLY LQMNSLRAED TAVYYCARGG ELSFYYYYGM DVWGQGTTVT | 120 |
| chain | VSSASTKGPS VFPLAPSSKS TSGGTAALGC LVKDYFPEPV TVSWNSGALT SGVHTFPAVL | 180 |
| | QSSGLYSLSS VVTVPSSSLG TQTYICNVNH KPSNTKVDKK VEPKSCDKTH TCPPCPAPEL | 240 |
| | LGGPSVFLFP PKPKDTLMIS RTPEVTCVVV DVSHEDPEVK FNWYVDGVEV HNAKTKPREE | 300 |
| | QYNSTYRVVS VLTVLHQDWL NGKEYKCKVS NKALPAPIEK TISKAKGQPR EPQVYTLPPS | 360 |
| | REEMTKNQVS LTCLVKGFYP SDIAVEWESN GQPENNYKTT PPVLDSDGSF FLYSKLTVDK | 420 |
| | SRWQQGNVFS CSVMHEALHN HYTQKSLSLS PGK | 453 |
| SEQ ID NO: 216 | DIQMTQSPSS LSASVGDRVT ITCRASQGIR NDLGWYQQKP GKAPKRLIYA ASTLQSGVPS | 60 |
| 35B10 light | RFSGSGSGTE FTLTISSLQP EDFATYYCLQ HNNYPWTFGQ GTKVEIKRTV AAPSVFIFPP | 120 |
| chain | SDEQLKSGTA SVVCLLNNFY PREAKVQWKV DNALQSGNSQ ESVTEQDSKD STYSLSSTLT | 180 |
| | LSKADYEKHK VYACEVTHQG LSSPVTKSFN RGEC | 214 |
| SEQ ID NO: 217 | QVQLVESGGG VVQPGRSLRL SCAASGFTFS SYGMHWVRQA PGKGLEWVAV IWYAGSNKYY | 60 |
| 35B10 variable | ADSVKGRFTI SRDNSKNTLY LQMNSLRAED TAVYYCARGG ELSFYYYYGM DVWGQGTTVT | 120 |
| heavy chain | VSS | 123 |
| SEQ ID NO: 218 | DIQMTQSPSS LSASVGDRVT ITCRASQGIR NDLGWYQQKP GKAPKRLIYA ASTLQSGVPS | 60 |
| 35B10 variable | RFSGSGSGTE FTLTISSLQP EDFATYYCLQ HNNYPWTFGQ GTKVEIKR | 108 |
| light chain | | |
| SEQ ID NO: 219 | SYGMH | 5 |
| 35B10 heavy | | |
| chain CDR1 | | |
| SEQ ID NO: 220 | VIWYAGSNKY YADSVKG | 17 |
| 35B10 heavy | | |
| chain CDR2 | | |
| SEQ ID NO: 221 | GGELSFYYYY GMDV | 14 |
| 35B10 heavy | | |
| chain CDR3 | | |
| SEQ ID NO: 222 | RASQGIRNDL G | 11 |
| 35B10 light | | |
| chain CDR1 | | |
| SEQ ID NO: 223 | AASTLQS | 7 |
| 35B10 light | | |
| chain CDR2 | | |
| SEQ ID NO: 224 | LQHNNYPWT | 9 |
| 35B10 light | | |
| chain CDR3 | | |
| SEQ ID NO: 225 | QVQVVESGGG VVQPGRSLRL SCAASGFTFS SYGMYWVRQA PGKGLEWVAV IWYEGSNKYY | 60 |
| 41E11 heavy | ADSVRGRFTI SRDNSKNTLY LQMNSLRAED TALYYCARGG QLGKDYYSGM DVWGQGTTVT | 120 |
| chain | VSSASTKGPS VFPLAPSSKS TSGGTAALGC LVKDYFPEPV TVSWNSGALT SGVHTFPAVL | 180 |
| | QSSGLYSLSS VVTVPSSSLG TQTYICNVNH KPSNTKVDKK VEPKSCDKTH TCPPCPAPEL | 240 |
| | LGGPSVFLFP PKPKDTLMIS RTPEVTCVVV DVSHEDPEVK FNWYVDGVEV HNAKTKPREE | 300 |
| | QYNSTYRVVS VLTVLHQDWL NGKEYKCKVS NKALPAPIEK TISKAKGQPR EPQVYTLPPS | 360 |
| | REEMTKNQVS LTCLVKGFYP SDIAVEWESN GQPENNYKTT PPVLDSDGSF FLYSKLTVDK | 420 |
| | SRWQQGNVFS CSVMHEALHN HYTQKSLSLS PGK | 453 |
| SEQ ID NO: 226 | DIQMTQSPSS LSASVGDRVT ITCRASQVIR NDLGWYQQKP GKAPKRLIYA ASSLQSGVPS | 60 |
| 41E11 light | RFSGSGSGTE FTLTISSLQP EDFATYYCLQ HNSYPLTFGG GTKVEIKRTV AAPSVFIFPP | 120 |
| chain | SDEQLKSGTA SVVCLLNNFY PREAKVQWKV DNALQSGNSQ ESVTEQDSKD STYSLSSTLT | 180 |
| | LSKADYEKHK VYACEVTHQG LSSPVTKSFN RGEC | 214 |
| SEQ ID NO: 227 | QVQVVESGGG VVQPGRSLRL SCAASGFTFS SYGMYWVRQA PGKGLEWVAV IWYEGSNKYY | 60 |
| 41E11 variable | ADSVRGRFTI SRDNSKNTLY LQMNSLRAED TALYYCARGG QLGKDYYSGM DVWGQGTTVT | 120 |
| heavy chain | VSS | 123 |
| SEQ ID NO: 228 | DIQMTQSPSS LSASVGDRVT ITCRASQVIR NDLGWYQQKP GKAPKRLIYA ASSLQSGVPS | 60 |
| 41E11 variable | RFSGSGSGTE FTLTISSLQP EDFATYYCLQ HNSYPLTFGG GTKVEIKR | 108 |
| light chain | | |
| SEQ ID NO: 229 | SYGMY | 5 |
| 41E11 heavy | | |
| chain CDR1 | | |
| SEQ ID NO: 230 | VIWYEGSNKY YADSVRG | 17 |
| 41E11 heavy | | |
| chain CDR2 | | |
| SEQ ID NO: 231 | GGQLGKDYYS GMDV | 14 |
| 41E11 heavy | | |
| chain CDR3 | | |
| SEQ ID NO: 232 | RASQVIRNDL G | 11 |
| 41E11 light | | |
| chain CDR1 | | |
| SEQ ID NO: 233 | AASSLQS | 7 |
| 41E11 light | | |
| chain CDR2 | | |
| SEQ ID NO: 234 | LQHNSYPLT | 9 |
| 41E11 light | | |
| chain CDR3 | | |
| SEQ ID NO: 235 | QVQLVESGGG VVQPGRSLRL SCAASGFTFS SYGMHWVRQA PGKGLEWVAV IWYPGSNKYY | 60 |
| 41G5 heavy chain | ADSVKGRFTI SRDNSKNTLY LQMNSLRAED TAVYYCARGG ELGRYYYYGM DVWGQGTTVT | 120 |
| | VSSASTKGPS VFPLAPSSKS TSGGTAALGC LVKDYFPEPV TVSWNSGALT SGVHTFPAVL | 180 |
| | QSSGLYSLSS VVTVPSSSLG TQTYICNVNH KPSNTKVDKK VEPKSCDKTH TCPPCPAPEL | 240 |
| | LGGPSVFLFP PKPKDTLMIS RTPEVTCVVV DVSHEDPEVK FNWYVDGVEV HNAKTKPREE | 300 |
| | QYNSTYRVVS VLTVLHQDWL NGKEYKCKVS NKALPAPIEK TISKAKGQPR EPQVYTLPPS | 360 |
| | REEMTKNQVS LTCLVKGFYP SDIAVEWESN GQPENNYKTT PPVLDSDGSF FLYSKLTVDK | 420 |
| | SRWQQGNVFS CSVMHEALHN HYTQKSLSLS PGK | 453 |
| SEQ ID NO: 236 | DIQMTQSPSS LSASVGDRVT VTCRASQGIR NDLGWYQQKP GKAPKRLIYA ASSLQSGVPS | 60 |
| 41G5 light chain | RFSGSGSGTE FTLTISSLQP EDFATYYCLQ HNNYPWTFGQ GTKVDIKRTV AAPSVFIFPP | 120 |
| | SDEQLKSGTA SVVCLLNNFY PREAKVQWKV DNALQSGNSQ ESVTEQDSKD STYSLSSTLT | 180 |
| | LSKADYEKHK VYACEVTHQG LSSPVTKSFN RGEC | 214 |
| SEQ ID NO: 237 | QVQLVESGGG VVQPGRSLRL SCAASGFTFS SYGMHWVRQA PGKGLEWVAV IWYPGSNKYY | 60 |
| 41G5 variable | ADSVKGRFTI SRDNSKNTLY LQMNSLRAED TAVYYCARGG ELGRYYYYGM DVWGQGTTVT | 120 |
| heavy chain | VSS | 123 |
| SEQ ID NO: 238 | DIQMTQSPSS LSASVGDRVT VTCRASQGIR NDLGWYQQKP GKAPKRLIYA ASSLQSGVPS | 60 |
| 41G5 variable | RFSGSGSGTE FTLTISSLQP EDFATYYCLQ HNNYPWTFGQ GTKVDIKR | 108 |
| light chain | | |
| SEQ ID NO: 239 | SYGMH | 5 |
| 41G5 heavy chain | | |
| CDR1 | | |
| SEQ ID NO: 240 | VIWYPGSNKY YADSVKG | 17 |
| 41G5 heavy chain | | |
| CDR2 | | |
| SEQ ID NO: 241 | GGELGRYYYY GMDV | 14 |
| 41G5 heavy chain | | |
| CDR3 | | |
| SEQ ID NO: 242 | RASQGIRNDL G | 11 |
| 41G5 light chain | | |
| CDR1 | | |
| SEQ ID NO: 243 | AASSLQS | 7 |
| 41G5 light chain | | |
| CDR2 | | |
| SEQ ID NO: 244 | LQHNNYPWT | 9 |
| 41G5 light chain | | |
| CDR3 | | |
| SEQ ID NO: 245 | QVQLVESGGG VVQPGRSLRL SCAASGFTFS SYGMHWVRQA PGKGLEWVAV IWYEGSNKYY | 60 |
| 42A11 heavy | ADSVKGRFTI SRDNSKNTLY LQMNSLRAED TAVYYCARGG QLGYYYYSGM DVWGQGTTVT | 120 |
| chain | VSSASTKGPS VFPLAPSSKS TSGGTAALGC LVKDYFPEPV TVSWNSGALT SGVHTFPAVL | 180 |
| | QSSGLYSLSS VVTVPSSSLG TQTYICNVNH KPSNTKVDKK VEPKSCDKTH TCPPCPAPEL | 240 |
| | LGGPSVFLFP PKPKDTLMIS RTPEVTCVVV DVSHEDPEVK FNWYVDGVEV HNAKTKPREE | 300 |
| | QYNSTYRVVS VLTVLHQDWL NGKEYKCKVS NKALPAPIEK TISKAKGQPR EPQVYTLPPS | 360 |
| | REEMTKNQVS LTCLVKGFYP SDIAVEWESN GQPENNYKTT PPVLDSDGSF FLYSKLTVDK | 420 |
| | SRWQQGNVFS CSVMHEALHN HYTQKSLSLS PGK | 453 |
| SEQ ID NO: 246 | DIQMTQSPSS LSASVGDRVT ITCRASQGIR NDLGWYQQKP GKAPKRLIYD ASSLQSGVPS | 60 |
| 42A11 light | RFSGSGSGTD FTLTISSLQP EEFATYYCLQ HNNYPWTFGQ GTKVEIKRTV AAPSVFIFPP | 120 |
| chain | SDEQLKSGTA SVVCLLNNFY PREAKVQWKV DNALQSGNSQ ESVTEQDSKD STYSLSSTLT | 180 |
| | LSKADYEKHK VYACEVTHQG LSSPVTKSFN RGEC | 214 |
| SEQ ID NO: 247 | QVQLVESGGG VVQPGRSLRL SCAASGFTFS SYGMHWVRQA PGKGLEWVAV IWYEGSNKYY | 60 |
| 42A11 variable | ADSVKGRFTI SRDNSKNTLY LQMNSLRAED TAVYYCARGG QLGYYYYSGM DVWGQGTTVT | 120 |
| heavy chain | VSS | 123 |
| SEQ ID NO: 248 | DIQMTQSPSS LSASVGDRVT ITCRASQGIR NDLGWYQQKP GKAPKRLIYD ASSLQSGVPS | 60 |
| 42A11 variable | RFSGSGSGTD FTLTISSLQP EEFATYYCLQ HNNYPWTFGQ GTKVEIKR | 108 |
| light chain | | |
| SEQ ID NO: 249 | SYGMH | 5 |
| 42A11 heavy | | |
| chain CDR1 | | |
| SEQ ID NO: 250 | VIWYEGSNKY YADSVKG | 17 |
| 42A11 heavy | | |
| chain CDR2 | | |
| SEQ ID NO: 251 | GGQLGYYYYS GMDV | 14 |
| 42A11 heavy | | |
| chain CDR3 | | |
| SEQ ID NO: 252 | RASQGIRNDL G | 11 |
| 42A11 light | | |
| chain CDR1 | | |
| SEQ ID NO: 253 | DASSLQS | 7 |
| 42A11 light | | |
| chain CDR2 | | |
| SEQ ID NO: 254 | LQHNNYPWT | 9 |
| 42A11 light | | |
| chain CDR3 | | |
| SEQ ID NO: 255 | QVQLVESGGG VVQPGRSLRL SCAASGFTLS SYGMHWVRQA PGKGLEWVAV IWYDGSNKYY | 60 |
| 44C1 heavy chain | ADSVKGRFTI SRDNSKNTLY LQMNSLRAED TAVYYCARRG TVTTPDFDYW GQGTLVTVSS | 120 |
| | ASTKGPSVFP LAPSSKSTSG GTAALGCLVK DYFPEPVTVS WNSGALTSGV HTFPAVLQSS | 180 |
| | GLYSLSSVVT VPSSSLGTQT YICNVNHKPS NTKVDKKVEP KSCDKTHTCP PCPAPELLGG | 240 |
| | PSVFLFPPKP KDTLMISRTP EVTCVVVDVS HEDPEVKFNW YVDGVEVHNA KTKPREEQYN | 300 |
| | STYRVVSVLT VLHQDWLNGK EYKCKVSNKA LPAPIEKTIS KAKGQPREPQ VYTLPPSREE | 360 |
| | MTKNQVSLTC LVKGFYPSDI AVEWESNGQP ENNYKTTPPV LDSDGSFFLY SKLTVDKSRW | 420 |
| | QQGNVFSCSV MHEALHNHYT QKSLSLSPGK | 450 |
| SEQ ID NO: 256 | QSALTQPASV SGSPGQSITI SCTGTSSDVG TYNLVSWYQQ HPGKAPKLMI YEVSKRPSGV | 60 |
| 44C1 light chain | SNRFSGSKSG NTASLTISGL QAEDEADYYC CSYAGFSTWV FGGGTKLTVL GQPKAAPSVT | 120 |
| | LFPPSSEELQ ANKATLVCLI SDFYPGAVTV AWKADSSPVK AGVETTTPSK QSNNKYAASS | 180 |
| | YLSLTPEQWK SHRSYSCQVT HEGSTVEKTV APTECS | 216 |
| SEQ ID NO: 257 | QVQLVESGGG VVQPGRSLRL SCAASGFTLS SYGMHWVRQA PGKGLEWVAV IWYDGSNKYY | 60 |
| 44C1 variable | ADSVKGRFTI SRDNSKNTLY LQMNSLRAED TAVYYCARRG TVTTPDFDYW GQGTLVTVSS | 120 |
| heavy chain | | |
| SEQ ID NO: 258 | QSALTQPASV SGSPGQSITI SCTGTSSDVG TYNLVSWYQQ HPGKAPKLMI YEVSKRPSGV | 60 |
| 44C1 variable | SNRFSGSKSG NTASLTISGL QAEDEADYYC CSYAGFSTWV FGGGTKLTVL G | 111 |
| light chain | | |
| SEQ ID NO: 259 | SYGMH | 5 |
| 44C1 heavy chain | | |
| CDR1 | | |
| SEQ ID NO: 260 | VIWYDGSNKY YADSVKG | 17 |
| 44C1 heavy chain | | |
| CDR2 | | |
| SEQ ID NO: 261 | RGTVTTPDFD Y | 11 |
| 44C1 heavy chain | | |
| CDR3 | | |
| SEQ ID NO: 262 | TGTSSDVGTY NLVS | 14 |
| 44C1 light chain | | |
| CDR1 | | |
| SEQ ID NO: 263 | EVSKRPS | 7 |
| 44C1 light chain | | |
| CDR2 | | |
| SEQ ID NO: 264 | CSYAGFSTWV | 10 |
| 44C1 light chain | | |
| CDR3 | | |
| SEQ ID NO: 265 | QVQLVESGGG VVQPGRSLRL SCAASGFTFS SYGMHWVRQA PGKGLEWVAV IWHDGSNKYY | 60 |
| 45A8 heavy chain | ADSVKGRFTI SKDNSKNTLY LQMNSLRAED TAVYYCAREY GGNFDYWGQG TLVTVSSAST | 120 |
| | KGPSVFPLAP SSKSTSGGTA ALGCLVKDYF PEPVTVSWNS GALTSGVHTF PAVLQSSGLY | 180 |
| | SLSSVVTVPS SSLGTQTYIC NVNHKPSNTK VDKKVEPKSC DKTHTCPPCP APELLGGPSV | 240 |
| | FLFPPKPKDT LMISRTPEVT CVVVDVSHED PEVKFNWYVD GVEVHNAKTK PREEQYNSTY | 300 |
| | RVVSVLTVLH QDWLNGKEYK CKVSNKALPA PIEKTISKAK GQPREPQVYT LPPSREEMTK | 360 |
| | NQVSLTCLVK GFYPSDIAVE WESNGQPENN YKTTPPVLDS DGSFFLYSKL TVDKSRWQQG | 420 |
| | NVFSCSVMHE ALHNHYTQKS LSLSPGK | 447 |
| SEQ ID NO: 266 | QSALTQPASV SGSPGQSITI SCTGTSSDVG TYNLVSWYQQ HPGKAPKLMI YEVSKRPSGI | 60 |
| 45A8 light chain | SNRFSGSKSG NTASLTISGL QAEDEADYYC CSYAGYSTWV FGGGTKLTVL RQPKAAPSVT | 120 |
| | LFPPSSEELQ ANKATLVCLI SDFYPGAVTV AWKADSSPVK AGVETTTPSK QSNNKYAASS | 180 |
| | YLSLTPEQWK SHRSYSCQVT HEGSTVEKTV APTECS | 216 |
| SEQ ID NO: 267 | QVQLVESGGG VVQPGRSLRL SCAASGFTFS SYGMHWVRQA PGKGLEWVAV IWHDGSNKYY | 60 |
| 45A8 variable | ADSVKGRFTI SKDNSKNTLY LQMNSLRAED TAVYYCAREY GGNFDYWGQG TLVTVSS | 117 |
| heavy chain | | |
| SEQ ID NO: 268 | QSALTQPASV SGSPGQSITI SCTGTSSDVG TYNLVSWYQQ HPGKAPKLMI YEVSKRPSGI | 60 |
| 45A8 variable | SNRFSGSKSG NTASLTISGL QAEDEADYYC CSYAGYSTWV FGGGTKLTVL R | 111 |
| light chain | | |
| SEQ ID NO: 269 | SYGMH | 5 |
| 45A8 heavy chain | | |
| CDR1 | | |
| SEQ ID NO: 270 | VIWHDGSNKY YADSVKG | 17 |
| 45A8 heavy chain | | |
| CDR2 | | |
| SEQ ID NO: 271 | EYGGNFDY | 8 |
| 45A8 heavy chain | | |
| CDR3 | | |
| SEQ ID NO: 272 | TGTSSDVGTY NLVS | 14 |
| 45A8 light chain | | |
| CDR1 | | |
| SEQ ID NO: 273 | EVSKRPS | 7 |
| 45A8 light chain | | |
| CDR2 | | |
| SEQ ID NO: 274 | CSYAGYSTWV | 10 |
| 45A8 light chain | | |
| CDR3 | | |
| SEQ ID NO: 275 | QVQLVESGGG VVQPGRSLRL SCAASGFTFS SYGMHWVRQA PGKGLEWVAV IWYAGSNKYY | 60 |
| 46E11 heavy | ADSVKGRFTI SRDNSKNTLY LQMNSLRAED TAVYYCARGD ILTGYSLYYG MDVWGQGTTV | 120 |
| chain | TVSSASTKGP SVFPLAPSSK STSGGTAALG CLVKDYFPEP VTVSWNSGAL TSGVHTFPAV | 180 |
| | LQSSGLYSLS SVVTVPSSSL GTQTYICNVN HKPSNTKVDK KVEPKSCDKT HTCPPCPAPE | 240 |
| | LLGGPSVFLF PPKPKDTLMI SRTPEVTCVV VDVSHEDPEV KFNWYVDGVE VHNAKTKPRE | 300 |
| | EQYNSTYRVV SVLTVLHQDW LNGKEYKCKV SNKALPAPIE KTISKAKGQP REPQVYTLPP | 360 |
| | SREEMTKNQV SLTCLVKGFY PSDIAVEWES NGQPENNYKT TPPVLDSDGS FFLYSKLTVD | 420 |
| | KSRWQQGNVF SCSVMHEALH NHYTQKSLSL SPGK | 454 |
| SEQ ID NO: 276 | DIQMTQSPSS LSASVGDRVT ITCRASQGIR NDLGWYQQKP GKAPKRLIYA ASSLQSGVPS | 60 |
| 46E11 light | RFSGSGSGAE FTLTISSLQP EDFATYYCLQ HNSYPWTFGQ GTKVEIKRTV AAPSVFIFPP | 120 |
| chain | SDEQLKSGTA SVVCLLNNFY PREAKVQWKV DNALQSGNSQ ESVTEQDSKD STYSLSSTLT | 180 |
| | LSKADYEKHK VYACEVTHQG LSSPVTKSFN RGEC | 214 |
| SEQ ID NO: 277 | QVQLVESGGG VVQPGRSLRL SCAASGFTFS SYGMHWVRQA PGKGLEWVAV IWYAGSNKYY | 60 |
| 46E11 variable | ADSVKGRFTI SRDNSKNTLY LQMNSLRAED TAVYYCARGD ILTGYSLYYG MDVWGQGTTV | 120 |
| heavy chain | TVSS | 124 |
| SEQ ID NO: 278 | DIQMTQSPSS LSASVGDRVT ITCRASQGIR NDLGWYQQKP GKAPKRLIYA ASSLQSGVPS | 60 |
| 46E11 variable | RFSGSGSGAE FTLTISSLQP EDFATYYCLQ HNSYPWTFGQ GTKVEIKR | 108 |
| light chain | | |
| SEQ ID NO: 279 | SYGMH | 5 |
| 46E11 heavy | | |
| chain CDR1 | | |
| SEQ ID NO: 280 | VIWYAGSNKY YADSVKG | 17 |
| 46E11 heavy | | |
| chain CDR2 | | |
| SEQ ID NO: 281 | GDILTGYSLY YGMDV | 15 |
| 46E11 heavy | | |
| chain CDR3 | | |
| SEQ ID NO: 282 | RASQGIRNDL G | 11 |
| 46E11 light | | |
| chain CDR1 | | |
| SEQ ID NO: 283 | AASSLQS | 7 |
| 46E11 light | | |
| chain CDR2 | | |
| SEQ ID NO: 284 | LQHNSYPWT | 9 |
| 46E11 light | | |
| chain CDR3 | | |
| SEQ ID NO: 285 | QVQLVESGGG VVQPGRSLRL SCAASGFTFS SYGMHWVRQA PGKGLEWVAV IWYAGSNKYY | 60 |
| 48H12 heavy | ADSVKGRFTI SRDNSKNTVY LQMNSLRAED TAVYYCARGG QLALYYYYGM DVWGQGTTVT | 120 |
| chain | VSSASTKGPS VFPLAPSSKS TSGGTAALGC LVKDYFPEPV TVSWNSGALT SGVHTFPAVL | 180 |
| | QSSGLYSLSS VVTVPSSSLG TQTYICNVNH KPSNTKVDKK VEPKSCDKTH TCPPCPAPEL | 240 |
| | LGGPSVFLFP PKPKDTLMIS RTPEVTCVVV DVSHEDPEVK FNWYVDGVEV HNAKTKPREE | 300 |
| | QYNSTYRVVS VLTVLHQDWL NGKEYKCKVS NKALPAPIEK TISKAKGQPR EPQVYTLPPS | 360 |
| | REEMTKNQVS LTCLVKGFYP SDIAVEWESN GQPENNYKTT PPVLDSDGSF FLYSKLTVDK | 420 |
| | SRWQQGNVFS CSVMHEALHN HYTQKSLSLS PGK | 453 |
| SEQ ID NO: 286 | DIQMTQSPSS LSASVGDRVT ITCRASQGIR NDLGWYQQKP GKAPKRLIYA ASSLQSGVPS | 60 |
| 48H12 light | RFSGSGSGTE FTLTISSLQP EDFATYYCLQ HNNYPWTFGQ GTKVEIKRTV AAPSVFIFPP | 120 |
| chain | SDEQLKSGTA SVVCLLNNFY PREAKVQWKV DNALQSGNSQ ESVTEQDSKD STYSLSSTLT | 180 |
| | LSKADYEKHK VYACEVTHQG LSSPVTKSFN RGEC | 214 |
| SEQ ID NO: 287 | QVQLVESGGG VVQPGRSLRL SCAASGFTFS SYGMHWVRQA PGKGLEWVAV IWYAGSNKYY | 60 |
| 48H12 variable | ADSVKGRFTI SRDNSKNTVY LQMNSLRAED TAVYYCARGG QLALYYYYGM DVWGQGTTVT | 120 |
| heavy chain | VSS | 123 |
| SEQ ID NO: 288 | DIQMTQSPSS LSASVGDRVT ITCRASQGIR NDLGWYQQKP GKAPKRLIYA ASSLQSGVPS | 60 |
| 48H12 variable | RFSGSGSGTE FTLTISSLQP EDFATYYCLQ HNNYPWTFGQ GTKVEIKR | 108 |
| light chain | | |
| SEQ ID NO: 289 | SYGMH | 5 |
| 48H12 heavy | | |
| chain CDR1 | | |
| SEQ ID NO: 290 | VIWYAGSNKY YADSVKG | 17 |
| 48H12 heavy | | |
| chain CDR2 | | |
| SEQ ID NO: 291 | GGQLALYYYY GMDV | 14 |
| 48H12 heavy | | |
| chain CDR3 | | |
| SEQ ID NO: 292 | RASQGIRNDL G | 11 |
| 48H12 light | | |
| chain CDR1 | | |
| SEQ ID NO: 293 | AASSLQS | 7 |
| 48H12 light | | |
| chain CDR2 | | |
| SEQ ID NO: 294 | LQHNNYPWT | 9 |
| 48H12 light | | |
| chain CDR3 | | |
| SEQ ID NO: 295 | QVQLVESGGG VVQPGRSLRL SCAASGFTFS SYGMYWVRQA PGKGLEWVAV IWYEGSNKYY | 60 |
| 48H7 heavy chain | ADSVKGRFTI SRDNSKNTLY LQMNSLRAED TAVYFCARGG ELGRDYYSGM DVWGQGTTVT | 120 |
| | VSSASTKGPS VFPLAPSSKS TSGGTAALGC LVKDYFPEPV TVSWNSGALT SGVHTFPAVL | 180 |
| | QSSGLYSLSS VVTVPSSSLG TQTYICNVNH KPSNTKVDKK VEPKSCDKTH TCPPCPAPEL | 240 |
| | LGGPSVFLFP PKPKDTLMIS RTPEVTCVVV DVSHEDPEVK FNWYVDGVEV HNAKTKPREE | 300 |
| | QYNSTYRVVS VLTVLHQDWL NGKEYKCKVS NKALPAPIEK TISKAKGQPR EPQVYTLPPS | 360 |
| | REEMTKNQVS LTCLVKGFYP SDIAVEWESN GQPENNYKTT PPVLDSDGSF FLYSKLTVDK | 420 |
| | SRWQQGNVFS CSVMHEALHN HYTQKSLSLS PGK | 453 |
| SEQ ID NO: 296 | DIQMTQSPSS LSASVGDRVT ITCRASQVIR NDLGWYQQKP GKAPKRLIYA ASSLQSGVPS | 60 |
| 48H7 light chain | RFSGSGSGTE FTLTISSLQP EDFATYYCLQ HNSYPITFGG GTKVEIKRTV AAPSVFIFPP | 120 |
| | SDEQLKSGTA SVVCLLNNFY PREAKVQWKV DNALQSGNSQ ESVTEQDSKD STYSLSSTLT | 180 |
| | LSKADYEKHK VYACEVTHQG LSSPVTKSFN RGEC | 214 |
| SEQ ID NO: 297 | QVQLVESGGG VVQPGRSLRL SCAASGFTFS SYGMYWVRQA PGKGLEWVAV IWYEGSNKYY | 60 |
| 48H7 variable | ADSVKGRFTI SRDNSKNTLY LQMNSLRAED TAVYFCARGG ELGRDYYSGM DVWGQGTTVT | 120 |
| heavy chain | VSS | 123 |
| SEQ ID NO: 298 | DIQMTQSPSS LSASVGDRVT ITCRASQVIR NDLGWYQQKP GKAPKRLIYA ASSLQSGVPS | 60 |
| 48H7 variable | RFSGSGSGTE FTLTISSLQP EDFATYYCLQ HNSYPITFGG GTKVEIKR | 108 |
| light chain | | |
| SEQ ID NO: 299 | SYGMY | 5 |
| 48H7 heavy chain | | |
| CDR1 | | |
| SEQ ID NO: 300 | VIWYEGSNKY YADSVKG | 17 |
| 48H7 heavy chain | | |
| CDR2 | | |
| SEQ ID NO: 301 | GGELGRDYYS GMDV | 14 |
| 48H7 heavy chain | | |
| CDR3 | | |
| SEQ ID NO: 302 | RASQVIRNDL G | 11 |
| 48H7 light chain | | |
| CDR1 | | |
| SEQ ID NO: 303 | AASSLQS | 7 |
| 48H7 light chain | | |
| CDR2 | | |
| SEQ ID NO: 304 | LQHNSYPIT | 9 |
| 48H7 light chain | | |
| CDR3 | | |
| SEQ ID NO: 305 | QMQLVESGGG VVQPGRSLRL SCAASGFTFS SYGMHWVRQA PGKGLEWVAV IWYAGSNKYY | 60 |
| 49D9 heavy chain | ADSVKGRFTI SRDNSKNTLY LQMNSLRAED TAVYYCARGG RLGFYYYYGM DVWGQGTTVT | 120 |
| | VSSASTKGPS VFPLAPSSKS TSGGTAALGC LVKDYFPEPV TVSWNSGALT SGVHTFPAVL | 180 |
| | QSSGLYSLSS VVTVPSSSLG TQTYICNVNH KPSNTKVDKK VEPKSCDKTH TCPPCPAPEL | 240 |
| | LGGPSVFLFP PKPKDTLMIS RTPEVTCVVV DVSHEDPEVK FNWYVDGVEV HNAKTKPREE | 300 |
| | QYNSTYRVVS VLTVLHQDWL NGKEYKCKVS NKALPAPIEK TISKAKGQPR EPQVYTLPPS | 360 |
| | REEMTKNQVS LTCLVKGFYP SDIAVEWESN GQPENNYKTT PPVLDSDGSF FLYSKLTVDK | 420 |
| | SRWQQGNVFS CSVMHEALHN HYTQKSLSLS PGK | 453 |
| SEQ ID NO: 306 | DIQMTQSPSS LSASVGDRVT ITCRASQGIR NDLGWYQQKP GKAPKRLIYA ASSLQSGVPS | 60 |
| 49D9 light chain | RFSGSGSGTE FTLTISSLQP EDFATYYCLQ LNSYPWTFGQ GTKVEIKRTV AAPSVFIFPP | 120 |
| | SDEQLKSGTA SVVCLLNNFY PREAKVQWKV DNALQSGNSQ ESVTEQDSKD STYSLSSTLT | 180 |
| | LSKADYEKHK VYACEVTHQG LSSPVTKSFN RGEC | 214 |
| SEQ ID NO: 307 | QMQLVESGGG VVQPGRSLRL SCAASGFTFS SYGMHWVRQA PGKGLEWVAV IWYAGSNKYY | 60 |
| 49D9 variable | ADSVKGRFTI SRDNSKNTLY LQMNSLRAED TAVYYCARGG RLGFYYYYGM DVWGQGTTVT | 120 |
| heavy chain | VSS | 123 |
| SEQ ID NO: 308 | DIQMTQSPSS LSASVGDRVT ITCRASQGIR NDLGWYQQKP GKAPKRLIYA ASSLQSGVPS | 60 |
| 49D9 variable | RFSGSGSGTE FTLTISSLQP EDFATYYCLQ LNSYPWTFGQ GTKVEIKR | 108 |
| light chain | | |
| SEQ ID NO: 309 | SYGMH | 5 |
| 49D9 heavy chain | | |
| CDR1 | | |
| SEQ ID NO: 310 | VIWYAGSNKY YADSVKG | 17 |
| 49D9 heavy chain | | |
| CDR2 | | |
| SEQ ID NO: 311 | GGRLGFYYYY GMDV | 14 |
| 49D9 heavy chain | | |
| CDR3 | | |
| SEQ ID NO: 312 | RASQGIRNDL G | 11 |
| 49D9 light chain | | |
| CDR1 | | |
| SEQ ID NO: 313 | AASSLQS | 7 |
| 49D9 light chain | | |
| CDR2 | | |
| SEQ ID NO: 314 | LQLNSYPWT | 9 |
| 49D9 light chain | | |
| CDR3 | | |
| SEQ ID NO: 315 | QVQLVESGGG VVQPGRSLRL SCAASGFTFS SYGMHWVRQA PGKGLEWVAV IWSDGNNKYY | 60 |
| 49E2 heavy chain | EDSVKGRFTI SRDSSKNTLF LQMNSLRAED TAVYYCARDT ATPFDYWGQG TLVTVSSAST | 120 |
| | KGPSVFPLAP SSKSTSGGTA ALGCLVKDYF PEPVTVSWNS GALTSGVHTF PAVLQSSGLY | 180 |
| | SLSSVVTVPS SSLGTQTYIC NVNHKPSNTK VDKKVEPKSC DKTHTCPPCP APELLGGPSV | 240 |
| | FLFPPKPKDT LMISRTPEVT CVVVDVSHED PEVKFNWYVD GVEVHNAKTK PREEQYNSTY | 300 |
| | RVVSVLTVLH QDWLNGKEYK CKVSNKALPA PIEKTISKAK GQPREPQVYT LPPSREEMTK | 360 |
| | NQVSLTCLVK GFYPSDIAVE WESNGQPENN YKTTPPVLDS DGSFFLYSKL TVDKSRWQQG | 420 |
| | NVFSCSVMHE ALHNHYTQKS LSLSPGK | 447 |
| SEQ ID NO: 316 | QSALTQPASV SGSPGQSITI SCTGTSSDVG IYNLVSWYQQ HPGKAPKLMI HEVSKRPSGV | 60 |
| 49E2 light chain | SNRFSGSKSG NTASLTISGL QAEDEADYYC CSYAGISTWV FGGGTKLTVL GQPKAAPSVT | 120 |
| | LFPPSSEELQ ANKATLVCLI SDFYPGAVTV AWKADSSPVK AGVETTTPSK QSNNKYAASS | 180 |
| | YLSLTPEQWK SHRSYSCQVT HEGSTVEKTV APTECS | 216 |
| SEQ ID NO: 317 | QVQLVESGGG VVQPGRSLRL SCAASGFTFS SYGMHWVRQA PGKGLEWVAV IWSDGNNKYY | 60 |
| 49E2 variable | EDSVKGRFTI SRDSSKNTLF LQMNSLRAED TAVYYCARDT ATPFDYWGQG TLVTVSS | 117 |
| heavy chain | | |
| SEQ ID NO: 318 | QSALTQPASV SGSPGQSITI SCTGTSSDVG IYNLVSWYQQ HPGKAPKLMI HEVSKRPSGV | 60 |
| 49E2 variable | SNRFSGSKSG NTASLTISGL QAEDEADYYC CSYAGISTWV FGGGTKLTVL G | 111 |
| light chain | | |
| SEQ ID NO: 319 | SYGMH | 5 |
| 49E2 heavy chain | | |
| CDR1 | | |
| SEQ ID NO: 320 | VIWSDGNNKY YEDSVKG | 17 |
| 49E2 heavy chain | | |
| CDR2 | | |
| SEQ ID NO: 321 | DTATPFDY | 8 |
| 49E2 heavy chain | | |
| CDR3 | | |
| SEQ ID NO: 322 | TGTSSDVGIY NLVS | 14 |
| 49E2 light chain | | |
| CDR1 | | |
| SEQ ID NO: 323 | EVSKRPS | 7 |
| 49E2 light chain | | |
| CDR2 | | |
| SEQ ID NO: 324 | CSYAGISTWV | 10 |
| 49E2 light chain | | |
| CDR3 | | |
| SEQ ID NO: 325 | QVQLVESGGG VVQPGRSLRL SCAASGFTFS SCGMHWVRQA PGKGLEWVAV ISYDGSNKYY | 60 |
| 48A9 heavy chain | ADSVKGRFTI SRDNSKNTLY LQMNSLRAED TAVYYCARDL RYNWNDGGVD YWGQGTLVTV | 120 |
| | SSASTKGPSV FPLAPSSKST SGGTAALGCL VKDYFPEPVT VSWNSGALTS GVHTFPAVLQ | 180 |
| | SSGLYSLSSV VTVPSSSLGT QTYICNVNHK PSNTKVDKKV EPKSCDKTHT CPPCPAPELL | 240 |
| | GGPSVFLFPP KPKDTLMISR TPEVTCVVVD VSHEDPEVKF NWYVDGVEVH NAKTKPREEQ | 300 |
| | YNSTYRVVSV LTVLHQDWLN GKEYKCKVSN KALPAPIEKT ISKAKGQPRE PQVYTLPPSR | 360 |
| | EEMTKNQVSL TCLVKGFYPS DIAVEWESNG QPENNYKTTP PVLDSDGSFF LYSKLTVDKS | 420 |
| | RWQQGNVFSC SVMHEALHNH YTQKSLSLSP GK | 452 |
| SEQ ID NO: 326 | DIQMTQSPSS LSASVGDRVI ITCRASQSIS SYLHWYKQKP GKAPKLLIYG ASRLQSGVPS | 60 |
| 48A9 light chain | RFSGSGSGTD FTLTISSLQP EDFATYYCQQ SSSTPLTFGG GTKVEIKRTV AAPSVFIFPP | 120 |
| | SDEQLKSGTA SVVCLLNNFY PREAKVQWKV DNALQSGNSQ ESVTEQDSKD STYSLSSTLT | 180 |
| | LSKADYEKHK VYACEVTHQG LSSPVTKSFN RGEC | 214 |
| SEQ ID NO: 327 | QVQLVESGGG VVQPGRSLRL SCAASGFTFS SCGMHWVRQA PGKGLEWVAV ISYDGSNKYY | 60 |
| 48A9 variable | ADSVKGRFTI SRDNSKNTLY LQMNSLRAED TAVYYCARDL RYNWNDGGVD YWGQGTLVTV | 120 |
| heavy chain | SS | 122 |
| SEQ ID NO: 328 | DIQMTQSPSS LSASVGDRVI ITCRASQSIS SYLHWYKQKP GKAPKLLIYG ASRLQSGVPS | 60 |
| 48A9 variable | RFSGSGSGTD FTLTISSLQP EDFATYYCQQ SSSTPLTFGG GTKVEIKR | 108 |
| light chain | | |
| SEQ ID NO: 329 | SCGMH | 5 |
| 48A9 heavy chain | | |
| CDR1 | | |
| SEQ ID NO: 330 | VISYDGSNKY YADSVKG | 17 |
| 48A9 heavy chain | | |
| CDR2 | | |
| SEQ ID NO: 331 | DLRYNWNDGG VDY | 13 |
| 48A9 heavy chain | | |
| CDR3 | | |
| SEQ ID NO: 332 | RASQSISSYL H | 11 |
| 48A9 light chain | | |
| CDR1 | | |
| SEQ ID NO: 333 | GASRLQS | 7 |
| 48A9 light chain | | |
| CDR2 | | |
| SEQ ID NO: 334 | QQSSSTPLT | 9 |
| 48A9 light chain | | |
| CDR3 | | |
| SEQ ID NO: 335 | QVQLQESGPG LVKPSQTLSL TCTVSGGSIS SGGYFWSWIR QHPGKGLEWI GYIYYSGTTY | 60 |
| 5H7 heavy chain | YNPSLKSRVT ISIDTSKNHF SLKLSSVTAA DTAVYYCARD LFYYDSSGPR GFDPWGQGTL | 120 |
| | VTVSSASTKG PSVFPLAPSS KSTSGGTAAL GCLVKDYFPE PVTVSWNSGA LTSGVHTFPA | 180 |
| | VLQSSGLYSL SSVVTVPSSS LGTQTYICNV NHKPSNTKVD KRVEPKSCDK THTCPPCPAP | 240 |
| | ELLGGPSVFL FPPKPKDTLM ISRTPEVTCV VVDVSHEDPE VKFNWYVDGV EVHNAKTKPR | 300 |
| | EEQYNSTYRV VSVLTVLHQD WLNGKEYKCK VSNKALPAPI EKTISKAKGQ PREPQVYTLP | 360 |
| | PSREEMTKNQ VSLTCLVKGF YPSDIAVEWE SNGQPENNYK TTPPVLDSDG SFFLYSKLTV | 420 |
| | DKSRWQQGNV FSCSVMHEAL HNHYTQKSLS LSPGK | 455 |
| SEQ ID NO: 336 | EIVLTQSPGT LSLSPGERAT LSCRASQTVS SNYLAWYQQK PGQAPRLLIY GSSTRATGIP | 60 |
| 5H7 light chain | DRFSGSGSGT DFTLTISRLE PEDFAVYYCQ QYDSSPWTFG QGTKVEIKRT VAAPSVFIFP | 120 |
| | PSDEQLKSGT ASVVCLLNNF YPREAKVQWK VDNALQSGNS QESVTEQDSK DSTYSLSSTL | 180 |
| | TLSKADYEKH KVYACEVTHQ GLSSPVTKSF NRGEC | 215 |
| SEQ ID NO: 337 | QVQLQESGPG LVKPSQTLSL TCTVSGGSIS SGGYFWSWIR QHPGKGLEWI GYIYYSGTTY | 60 |
| 5H7 variable | YNPSLKSRVT ISIDTSKNHF SLKLSSVTAA DTAVYYCARD LFYYDSSGPR GFDPWGQGTL | 120 |
| heavy chain | VTVSS | 125 |
| SEQ ID NO: 338 | EIVLTQSPGT LSLSPGERAT LSCRASQTVS SNYLAWYQQK PGQAPRLLIY GSSTRATGIP | 60 |
| 5H7 variable | DRFSGSGSGT DFTLTISRLE PEDFAVYYCQ QYDSSPWTFG QGTKVEIKR | 109 |
| light chain | | |
| SEQ ID NO: 339 | SGGYFWS | 7 |
| 5H7 heavy chain | | |
| CDR1 | | |
| SEQ ID NO: 340 | YIYYSGTTYY NPSLKS | 16 |
| 5H7 heavy chain | | |
| CDR2 | | |
| SEQ ID NO: 341 | DLFYYDSSGP RGFDP | 15 |
| 5H7 heavy chain | | |
| CDR3 | | |
| SEQ ID NO: 342 | RASQTVSSNY LA | 12 |
| 5H7 light chain | | |
| CDR1 | | |
| SEQ ID NO: 343 | GSSTRAT | 7 |
| 5H7 light chain | | |
| CDR2 | | |
| SEQ ID NO: 344 | QQYDSSPWT | 9 |
| 5H7 light chain | | |
| CDR3 | | |
| SEQ ID NO: 345 | QVQLVESGGG VVQPGRSLRL SCAASGFTFS SYGMHWVRQA PGKGLEWMAV IWYVGSNKYY | 60 |
| 7A10 heavy chain | ADSVKGRFTI SRDNSKNTLY LQMNSLSAED TAVYYCARGG ELGRDYYSGM DVWGQGTTVT | 120 |
| | VSSASTKGPS VFPLAPSSKS TSGGTAALGC LVKDYFPEPV TVSWNSGALT SGVHTFPAVL | 180 |
| | QSSGLYSLSS VVTVPSSSLG TQTYICNVNH KPSNTKVDKR VEPKSCDKTH TCPPCPAPEL | 240 |
| | LGGPSVFLFP PKPKDTLMIS RTPEVTCVVV DVSHEDPEVK FNWYVDGVEV HNAKTKPREE | 300 |
| | QYNSTYRVVS VLTVLHQDWL NGKEYKCKVS NKALPAPIEK TISKAKGQPR EPQVYTLPPS | 360 |
| | REEMTKNQVS LTCLVKGFYP SDIAVEWESN GQPENNYKTT PPVLDSDGSF FLYSKLTVDK | 420 |
| | SRWQQGNVFS CSVMHEALHN HYTQKSLSLS PGK | 453 |
| SEQ ID NO: 346 | DIQMTQSPSS LSASVGDRVT ITCRASQGIR NDLGWYQQKP GKAPKRLIYA ASSLQSGVPS | 60 |
| 7A10 light chain | RFSGSGSGTE FTLTISSLQP EDFATYYCQQ HNSYPWTFGQ GTKVEIKRTV AAPSVFIFPP | 120 |
| | SDEQLKSGTA SVVCLLNNFY PREAKVQWKV DNALQSGNSQ ESVTEQDSKD STYSLSSTLT | 180 |
| | LSKADYEKHK VYACEVTHQG LSSPVTKSFN RGEC | 214 |
| SEQ ID NO: 347 | QVQLVESGGG VVQPGRSLRL SCAASGFTFS SYGMHWVRQA PGKGLEWMAV IWYVGSNKYY | 60 |
| 7A10 variable | ADSVKGRFTI SRDNSKNTLY LQMNSLSAED TAVYYCARGG ELGRDYYSGM DVWGQGTTVT | 120 |
| heavy chain | VSS | 123 |
| SEQ ID NO: 348 | DIQMTQSPSS LSASVGDRVT ITCRASQGIR NDLGWYQQKP GKAPKRLIYA ASSLQSGVPS | 60 |
| 7A10 variable | RFSGSGSGTE FTLTISSLQP EDFATYYCQQ HNSYPWTFGQ GTKVEIKR | 108 |
| light chain | | |
| SEQ ID NO: 349 | SYGMH | 5 |
| 7A10 heavy chain | | |
| CDR1 | | |
| SEQ ID NO: 350 | VIWYVGSNKY YADSVKG | 17 |
| 7A10 heavy chain | | |
| CDR2 | | |
| SEQ ID NO: 351 | GGELGRDYYS GMDV | 14 |
| 7A10 heavy chain | | |
| CDR3 | | |
| SEQ ID NO: 352 | RASQGIRNDL G | 11 |
| 7A10 light chain | | |
| CDR1 | | |
| SEQ ID NO: 353 | AASSLQS | 7 |
| 7A10 light chain | | |
| CDR2 | | |
| SEQ ID NO: 354 | QQHNSYPWT | 9 |
| 7A10 light chain | | |
| CDR3 | | |
| SEQ ID NO: 355 | QVQLVESGGG VVQPGRSLRL SCVASGFTFS SYGMHWIRQA PGKGLEWVAV IWYEGSNKYY | 60 |
| 9H6 heavy chain | ADSVKGRFTI SRDNSKNTLY LQMNSLRAED TAVYYCARGG RLGKDYYSGM DVWGQGTTVT | 120 |
| | VSSASTKGPS VFPLAPSSKS TSGGTAALGC LVKDYFPEPV TVSWNSGALT SGVHTFPAVL | 180 |
| | QSSGLYSLSS VVTVPSSSLG TQTYICNVNH KPSNTKVDKR VEPKSCDKTH TCPPCPAPEL | 240 |
| | LGGPSVFLFP PKPKDTLMIS RTPEVTCVVV DVSHEDPEVK FNWYVDGVEV HNAKTKPREE | 300 |
| | QYNSTYRVVS VLTVLHQDWL NGKEYKCKVS NKALPAPIEK TISKAKGQPR EPQVYTLPPS | 360 |
| | REEMTKNQVS LTCLVKGFYP SDIAVEWESN GQPENNYKTT PPVLDSDGSF FLYSKLTVDK | 420 |
| | SRWQQGNVFS CSVMHEALHN HYTQKSLSLS PGK | 453 |
| SEQ ID NO: 356 | DIQMTQSPSS LSASVGDRVT ITCRASQGIR NDLGWYQQKP GKAPNRLIYA TSSLQSGVPS | 60 |
| 9H6 light chain | RFSGSGSGTE FTLTISSLQP EDFATYYCLQ HNTYPWTFGQ GTKVEIKRTV AAPSVFIFPP | 120 |
| | SDEQLKSGTA SVVCLLNNFY PREAKVQWKV DNALQSGNSQ ESVTEQDSKD STYSLSSTLT | 180 |
| | LSKADYEKHK VYACEVTHQG LSSPVTKSFN RGEC | 214 |
| SEQ ID NO: 357 | QVQLVESGGG VVQPGRSLRL SCVASGFTFS SYGMHWIRQA PGKGLEWVAV IWYEGSNKYY | 60 |
| 9H6 variable | ADSVKGRFTI SRDNSKNTLY LQMNSLRAED TAVYYCARGG RLGKDYYSGM DVWGQGTTVT | 120 |
| heavy chain | VSS | 123 |
| SEQ ID NO: 358 | DIQMTQSPSS LSASVGDRVT ITCRASQGIR NDLGWYQQKP GKAPNRLIYA TSSLQSGVPS | 60 |
| 9H6 variable | RFSGSGSGTE FTLTISSLQP EDFATYYCLQ HNTYPWTFGQ GTKVEIKR | 108 |
| light chain | | |
| SEQ ID NO: 359 | SYGMH | 5 |
| 9H6 heavy chain | | |
| CDR1 | | |
| SEQ ID NO: 360 | VIWYEGSNKY YADSVKG | 17 |
| 9H6 heavy chain | | |
| CDR2 | | |
| SEQ ID NO: 361 | GGRLGKDYYS GMDV | 14 |
| 9H6 heavy chain | | |
| CDR3 | | |
| SEQ ID NO: 362 | RASQGIRNDL G | 11 |
| 9H6 light chain | | |
| CDR1 | | |
| SEQ ID NO: 363 | ATSSLQS | 7 |
| 9H6 light chain | | |
| CDR2 | | |
| SEQ ID NO: 364 | LQHNTYPWT | 9 |
| 9H6 light chain | | |
| CDR3 | | |

[1232] The GITR binding molecules described above may also be modified to employ any Fc variant which is known to impart an improvement (e.g., reduction) in effector function and/or FcR binding. The Fc variants may include, for example, any one of the amino acid substitutions disclosed in International Patent Application Publication Nos. WO 1988/07089 A1, WO 1996/14339 A1, WO 1998/05787 A1, WO 1998/23289 A1, WO 1999/51642 A1, WO 99/58572 A1, WO 2000/09560 A2, WO 2000/32767 A1, WO 2000/42072 A2, WO 2002/44215 A2, WO 2002/060919 A2, WO 2003/074569 A2, WO 2004/016750 A2, WO 2004/029207 A2, WO 2004/035752 A2, WO 2004/063351 A2, WO 2004/074455 A2, WO 2004/099249 A2, WO 2005/040217 A2, WO 2005/070963 A1, WO 2005/077981 A2, WO 2005/092925 A2, WO 2005/123780 A2, WO 2006/019447 A1, WO 2006/047350 A2, and WO 2006/085967 A2; and U.S. Pat. Nos. 5,648,260; 5,739,277; 5,834,250; 5,869,046; 6,096,871; 6,121,022; 6,194,551; 6,242,195; 6,277,375; 6,528,624; 6,538,124; 6,737,056; 6,821,505; 6,998,253; and 7,083,784; the disclosures of which are incorporated by reference herein.

[1233] In an embodiment, the GITR binding molecule is a GITR binding biosimilar monoclonal antibody approved by drug regulatory authorities with reference to any of the foregoing GITR binding antibodies. In an embodiment, the biosimilar comprises a GITR binding biosimilar antibody comprising an amino acid sequence which has at least 97% sequence identity, e.g., 97%, 98%, 99%, or 100% sequence identity, to the amino acid sequence of a reference medicinal product or reference biological product and which comprises one or more post-translational modifications as compared to the reference medicinal product or reference biological product, wherein the reference medicinal product or reference biological product is any of the foregoing GITR binding antibodies. In some embodiments, the one or more post-translational modifications are selected from one or more of: glycosylation, oxidation, deamidation, and truncation. In some embodiments, the biosimilar is a GITR binding antibody authorized or submitted for authorization, wherein the GITR binding antibody is provided in a formulation which differs from the formulations of a reference medicinal product or reference biological product, wherein the reference medicinal product or reference biological product is any of the foregoing GITR binding antibodies. The GITR binding antibody may be authorized by a drug regulatory authority such as the U.S. FDA and/or the European Union's EMA. In some embodiments, the biosimilar is provided as a composition which further comprises one or more excipients, wherein the one or more excipients are the same or different to the excipients comprised in a reference medicinal product or reference biological product, wherein the reference medicinal product or reference biological product is any of the foregoing GITR binding antibodies. In some embodiments, the biosimilar comprises one or more excipients selected from tris-hydrochloride, sodium chloride, mannitol, pentetic acid, polysorbate 80, sodium hydroxide, and hydrochloric acid.

### 4-1BB Agonists

[1234] As used herein, the term “4-1BB agonist” may refer to any antibody or protein that binds to 4-1BB antigen. The 4-1BB agonist may be any 4-1BB agonist known in the art. In particular, it is one of the 4-1BB agonists described in more detail in the following paragraphs. In preferred embodiments, the compositions described herein provide a combination of a 4-1BB agonist with a BTK inhibitor, or methods of using a combination of a 4-1BB agonist with a BTK inhibitor to treat hyperproliferative disorders including cancers and immune, autoimmune, and inflammatory diseases.

[1235] In a preferred embodiment, the 4-1BB agonist is selected form the group consisting of PF-05082566 (Pfizer), 1D8, 3Elor, 20H4.9-IgG4 (10C7 or BMS-663513; urelumab), 4B4 (BioLegend 309809), H4-1BB-M127 (BD Pharmingen 552532), BBK2 (Thermo Fisher MS621PABX), 145501 (Leinco Technologies B591), antibody produced by cell line deposited as ATCC No. HB-11248, BioLegend 31 1503), C65-485 (BD Pharmingen 559446), 20H4.9-IgG1 (BMS-663031), 4E9, BMS-554271, BMS-469492, 3H3, BMS-469497, 3E1, 53A2, and 3B8, or a fragment, derivative, conjugate, variant, radioisotope-labeled complex, or biosimilar thereof.

[1236] In an embodiment, the invention provides a method of treating a hyperproliferative disorders, comprising co-administering, to a mammal in need thereof, therapeutically effective amounts of (1) a BTK inhibitor or a pharmaceutically acceptable salt, solvate, hydrate, cocrystal, or prodrug thereof and (2) a 4-1BB agonist, or a fragment, derivative, conjugate, variant, radioisotope-labeled complex, or biosimilar thereof, wherein the 4-1BB agonist is selected from the group consisting of: PF-05082566 (a 4-1BB agonist monoclonal antibody from Pfizer), 1D8, 3Elor, 4B4 (BioLegend 309809), H4-1BB-M127 (BD Pharmingen 552532), BBK2 (Thermo Fisher MS621PABX), 145501 (Leinco Technologies B591), antibody produced by cell line deposited as ATCC No. HB-11248 (U.S. Pat. No. 6,974,863), 5F4 (BioLegend 31 1503), C65-485 (BD Pharmingen 559446), antibodies are those disclosed in U.S. Published Application No. US 2005/0095244, the antibodies disclosed in U.S. Pat. No. 7,288,638 (such as 20H4.9-IgG4, also known as urelumab, 10C7, or BMS-663513 (Bristol Myers Squibb)) or 20H4.9-IgG1 (BMS-663031)), the antibodies disclosed in issued U.S. Pat. No. 6,887,673 (4E9 or BMS-554271), the antibodies disclosed in U.S. Pat. No. 7,214,493, the antibodies disclosed in issued U.S. Pat. No. 6,303,121, the antibodies disclosed in U.S. Pat. No. 6,569,997, the antibodies disclosed in issued U.S. Pat. No. 6,905,685, the antibodies disclosed in issued U.S. Pat. No. 6,362,325 (1D8 or BMS-469492; 3H3 or BMS-469497; or 3E1), the antibodies disclosed in U.S. Pat. No. 6,974,863 (such as 53A2); or the antibodies disclosed in U.S. Pat. No. 6,210,669 (such as 1D8, 3B8, or 3E1), agonistic antibodies described in U.S. Pat. No. 5,928,893, agonistic antibodies described in U.S. Pat. No. 6,303,121, and agonistic antibodies described in U.S. Pat. No. 6,569,997; each of which is incorporated by reference herein. The 4-1BB agonist may also be selected from the compounds disclosed in International Patent Application Publication Nos. WO 2012/177788, WO 2015/119923, and WO 2010/042433, each of which is incorporated by reference herein.

[1237] In an embodiment, the 4-1BB agonist is an antigen binding protein that is a fully human antibody. In an embodiment, the 4-1BB agonist is an antigen binding protein that is a humanized antibody. 4-1BB agonistic or 4-1BBL antagonistic agents for use in the presently disclosed methods and compositions include, without limitation, anti-CD137 antibodies, human anti-CD137 antibodies, mouse anti-CD 137 antibodies, mammalian anti-CD 137 antibodies, humanized anti-anti-CD137 antibodies, monoclonal anti-CD137 antibodies, polyclonal anti-CD 137 antibodies, chimeric anti-CD137 antibodies, anti-4-1BB antibodies, anti-CD137 adnectins, anti-CD137 domain antibodies, single chain anti-CD137 fragments, heavy chain anti-CD137 fragments, light chain anti-CD137 fragments, and pharmaceutically-acceptable salts, cocrystals, hydrates, solvates, or prodrugs thereof.

[1238] The 4-1BB agonist may be any 4-1BB binding molecule inhibitor known in the art. The 4-1BB binding molecule may be a monoclonal antibody or fusion protein capable of binding to 4-1BB. The 4-1BB agonists or 4-1BB binding molecules may comprise an immunoglobulin heavy chain of any isotype (e.g., IgG, IgE, IgM, IgD, IgA, and IgY), class (e.g., IgG1, IgG2, IgG3, IgG4, IgA1 and IgA2) or subclass of immunoglobulin molecule. The 4-1BB agonist may have both a heavy and a light chain. As used herein, the term binding molecule also includes antibodies (including full length antibodies), monoclonal antibodies (including full length monoclonal antibodies), polyclonal antibodies, multispecific antibodies (e.g., bispecific antibodies), human, humanized or chimeric antibodies, and antibody fragments, e.g., Fab fragments, F(ab′) fragments, fragments produced by a Fab expression library, epitope-binding fragments of any of the above, and engineered forms of antibodies, e.g., scFv molecules, that bind to 4-1BB. The 4-1BB agonist or binding molecules may also be a fusion protein.

[1239] In some embodiments, the 4-1BB agonists are characterized by binding to human 4-1BB (SEQ ID NO:433) with high affinity and agonistic activity. In an embodiment, the 4-1BB agonist is a binding molecule that binds to human 4-1BB (SEQ ID NO:433). In an embodiment, the 4-1BB agonist is a binding molecule that binds to murine 4-1BB (SEQ ID NO:434). The amino acid sequences of 4-1BB antigen to which a 4-1BB agonist or binding molecule binds are summarized in TABLE 3.

TABLE 3
Amino acid sequences of 4-1BB antigens.

| Identifier | Sequence (One-Letter Amino Acid Symbols) | |
|---|---|---|
| SEQ ID NO: 433 | MGNSCYNIVA TLLLVLNFER TRSLQDPCSN CPAGTFCDNN RNQICSPCPP NSFSSAGGQR | 60 |
| human 4-1BB, | TCDICRQCKG VFRTRKECSS TSNAECDCTP GFHCLGAGCS MCEQDCKQGQ ELTKKGCKDC | 120 |
| Tumor necrosis | CFGTFNDQKR GICRPWTNCS LDGKSVLVNG TKERDVVCGP SPADLSPGAS SVTPPAPARE | 180 |
| factor receptor | PGHSPQIISF FLALTSTALL FLLFFLTLRF SVVKRGRKKL LYIFKQPFMR PVQTTQEEDG | 240 |
| superfamily, | CSCRFPEEEE GGCEL | 255 |
| member 9 (Homo | | |
| sapiens) | | |
| SEQ ID NO: 434 | MGNNCYNVVV IVLLLVGCEK VGAVQNSCDN CQPGTFCRKY NPVCKSCPPS TFSSIGGQPN | 60 |
| murine 4-1BB, | CNICRVCAGY FRFKKFCSST HNAECECIEG FHCLGPQCTR CEKDCRPGQE LTKQGCKTCS | 120 |
| Tumor necrosis | LGTFNDQNGT GVCRPWTNCS LDGRSVLKTG TTEKDVVCGP PVVSFSPSTT ISVTPEGGPG | 180 |
| factor receptor | GHSLQVLTLF LALTSALLLA LIFITLLFSV LKWIRKKFPH IFKQPFKKTT GAAQEEDACS | 240 |
| superfamily, | CRCPQEEEGG GGGYEL | 256 |
| member 9 (Mus | | |
| musculus) | | |

[1240] In some embodiments, the compositions and methods described include a 4-1BB agonist that binds human or murine 4-1BB with a K_{D} of about 100 pM or lower, binds human or murine 4-1BB with a K_{D} of about 90 pM or lower, binds human or murine 4-1BB with a K_{D} of about 80 pM or lower, binds human or murine 4-1BB with a K_{D} of about 70 pM or lower, binds human or murine 4-1BB with a K_{D} of about 60 pM or lower, binds human or murine 4-1BB with a K_{D} of about 50 pM or lower, binds human or murine 4-1BB with a K_{D} of about 40 pM or lower, or binds human or murine 4-1BB with a K_{D} of about 30 pM or lower.

[1241] In some embodiments, the compositions and methods described include a 4-1BB agonist that binds to human or murine 4-1BB with a k_{assoc} of about 7.5×10⁵ l/M·s or faster, binds to human or murine 4-1BB with a k_{assoc} of about 7.5×10⁵ l/M·s or faster, binds to human or murine 4-1BB with a k_{assoc} of about 8×10⁵ l/M·s or faster, binds to human or murine 4-1BB with a k_{assoc} of about 8.5×10⁵ l/M·s or faster, binds to human or murine 4-1BB with a k_{assoc} of about 9×10⁵ l/M·s or faster, binds to human or murine 4-1BB with a k_{assoc} of about 9.5×10⁵ 1/M·s or faster, or binds to human or murine 4-1BB with a k_{assoc} of about 1×10⁶ l/M·s or faster.

[1242] In some embodiments, the compositions and methods described include a 4-1BB agonist that binds to human or murine 4-1BB with a k_{dissoc} of about 2×10⁻⁵ l/s or slower, binds to human or murine 4-1BB with a k_{dissoc} of about 2.1×10⁻⁵ l/s or slower, binds to human or murine 4-1BB with a k_{dissoc} of about 2.2×10⁻⁵ l/s or slower, binds to human or murine 4-1BB with a k_{dissoc} of about 2.3×10⁻⁵ l/s or slower, binds to human or murine 4-1BB with a k_{dissoc} of about 2.4×10⁻⁵ l/s or slower, binds to human or murine 4-1BB with a k_{dissoc} of about 2.5×10⁻⁵ 1/s or slower, binds to human or murine 4-1BB with a k_{dissoc} of about 2.6×10⁻⁵ l/s or slower or binds to human or murine 4-1BB with a k_{dissoc} of about 2.7×10⁻⁵ l/s or slower, binds to human or murine 4-1BB with a k_{dissoc} of about 2.8×10⁻⁵ l/s or slower, binds to human or murine 4-1BB with a k_{dissoc} of about 2.9×10⁻⁵ l/s or slower, or binds to human or murine 4-1BB with a k_{dissoc} of about 3×10⁻⁵ l/s or slower.

[1243] In some embodiments, the compositions and methods described include a 4-1BB agonist that binds to human or murine 4-1BB with an IC₅₀ of about 10 nM or lower, binds to human or murine 4-1BB with an IC₅₀ of about 9 nM or lower, binds to human or murine 4-1BB with an IC₅₀ of about 8 nM or lower, binds to human or murine 4-1BB with an IC₅₀ of about 7 nM or lower, binds to human or murine 4-1BB with an IC₅₀ of about 6 nM or lower, binds to human or murine 4-1BB with an IC₅₀ of about 5 nM or lower, binds to human or murine 4-1BB with an IC₅₀ of about 4 nM or lower, binds to human or murine 4-1BB with an IC₅₀ of about 3 nM or lower, binds to human or murine 4-1BB with an IC₅₀ of about 2 nM or lower, or binds to human or murine 4-1BB with an IC₅₀ of about 1 nM or lower.

[1244] In a preferred embodiment, the 4-1BB agonist is an agonistic, anti-4-1BB monoclonal antibody (i.e., an antibody derived from a single cell line). Agonistic anti-4-1BB antibodies are known to induce strong immune responses. Lee, et al., PLOS One 2013, 8, e69677. In a preferred embodiment, the 4-1BB agonist is a monoclonal antibody that binds specifically to 4-1BB antigen. In an embodiment, the 4-1BB agonist is a 4-1BB receptor blocker. In some embodiments, the 4-1BB agonist is an agonistic, anti-4-1BB monoclonal antibody that abrogates antibody-dependent cellular toxicity (ADCC), for example NK cell cytotoxicity. In some embodiments, the 4-1BB agonist is an agonistic, anti-4-1BB monoclonal antibody that abrogates antibody-dependent cell phagocytosis (ADCP). In some embodiments, the 4-1BB agonist is an agonistic, anti-4-1BB monoclonal antibody that abrogates complement-dependent cytotoxicity (CDC). In some embodiments, the 4-1BB agonist is an agonistic, anti-4-1BB monoclonal antibody which abrogates Fc region functionality.

[1245] In an embodiment, the 4-1BB agonist is the monoclonal antibody PF-05082566 (Pfizer, Inc.), the amino acid sequences of which are set forth in TABLE 4, or biosimilars, antigen-binding fragments, conjugates, or variants thereof. The PF-05082566 monoclonal antibody includes a heavy chain given by SEQ ID NO:435 and a light chain given by SEQ ID NO:436 (TABLE 4). In an embodiment, a 4-1BB agonist antibody comprises heavy and light chains having the sequences shown in SEQ ID NO:435 and SEQ ID NO:436, respectively, or antigen binding fragments, Fab fragments, single-chain variable fragments (scFv), variants, or conjugates thereof. In an embodiment, a 4-1BB agonist antibody comprises heavy and light chains that are each at least 99% identical to the sequences shown in SEQ ID NO:435 and SEQ ID NO:436, respectively. In an embodiment, a 4-1BB agonist antibody comprises heavy and light chains that are each at least 98% identical to the sequences shown in SEQ ID NO:435 and SEQ ID NO:436, respectively. In an embodiment, a 4-1BB agonist antibody comprises heavy and light chains that are each at least 97% identical to the sequences shown in SEQ ID NO:435 and SEQ ID NO:436, respectively. In an embodiment, a 4-1BB agonist antibody comprises heavy and light chains that are each at least 96% identical to the sequences shown in SEQ ID NO:435 and SEQ ID NO:436, respectively. In an embodiment, a 4-1BB agonist antibody comprises heavy and light chains that are each at least 95% identical to the sequences shown in SEQ ID NO:435 and SEQ ID NO:436, respectively.

[1246] In an embodiment, the 4-1BB agonist antibody is a 4-1BB agonist biosimilar monoclonal antibody approved by drug regulatory authorities with reference to PF-05082566. In an embodiment, the biosimilar monoclonal antibody comprises an 4-1BB antibody comprising an amino acid sequence which has at least 97% sequence identity, e.g., 97%, 98%, 99% or 100% sequence identity, to the amino acid sequence of a reference medicinal product or reference biological product and which comprises one or more post-translational modifications as compared to the reference medicinal product or reference biological product, wherein the reference medicinal product or reference biological product is PF-05082566. In some embodiments, the one or more post-translational modifications are selected from one or more of: glycosylation, oxidation, deamidation, and truncation. In some embodiments, the biosimilar is a 4-1BB agonist antibody authorized or submitted for authorization, wherein the 4-1BB agonist antibody is provided in a formulation which differs from the formulations of a reference medicinal product or reference biological product, wherein the reference medicinal product or reference biological product is PF-05082566. The 4-1BB agonist antibody may be authorized by a drug regulatory authority such as the U.S. FDA and/or the European Union's EMA. In some embodiments, the biosimilar is provided as a composition which further comprises one or more excipients, wherein the one or more excipients are the same or different to the excipients comprised in a reference medicinal product or reference biological product, wherein the reference medicinal product or reference biological product is PF-05082566. In some embodiments, the biosimilar is provided as a composition which further comprises one or more excipients, wherein the one or more excipients are the same or different to the excipients comprised in a reference medicinal product or reference biological product, wherein the reference medicinal product or reference biological product is PF-05082566.

[1247] In an embodiment, the 4-1BB agonist antibody comprises the heavy and light chain CDRs or variable regions (VRs) of PF-05082566. In an embodiment, the 4-1BB agonist antibody heavy chain variable region (V_{H}) comprises the sequence shown in SEQ ID NO:437, and the 4-1BB agonist antibody light chain variable region (V_{L}) comprises the sequence shown in SEQ ID NO:438, and conservative amino acid substitutions thereof. In an embodiment, a 4-1BB agonist antibody comprises V_{H} and V_{L} regions that are each at least 99% identical to the sequences shown in SEQ ID NO:437 and SEQ ID NO:438, respectively. In an embodiment, a 4-1BB agonist antibody comprises V_{H} and V_{L} regions that are each at least 98% identical to the sequences shown in SEQ ID NO:437 and SEQ ID NO:438, respectively. In an embodiment, a 4-1BB agonist antibody comprises V_{H} and V_{L} regions that are each at least 97% identical to the sequences shown in SEQ ID NO:437 and SEQ ID NO:438, respectively. In an embodiment, a 4-1BB agonist antibody comprises V_{H} and V_{L} regions that are each at least 96% identical to the sequences shown in SEQ ID NO:437 and SEQ ID NO:438, respectively. In an embodiment, a 4-1BB agonist antibody comprises V_{H} and V_{L} regions that are each at least 95% identical to the sequences shown in SEQ ID NO:437 and SEQ ID NO:438, respectively.

[1248] In an embodiment, a 4-1BB agonist antibody comprises heavy chain CDR1, CDR2 and CDR3 domains having the sequences set forth in SEQ ID NO:439, SEQ ID NO:440, and SEQ ID NO:441, respectively, and conservative amino acid substitutions thereof, and light chain CDR1, CDR2 and CDR3 domains having the sequences set forth in SEQ ID NO:442, SEQ ID NO:443, and SEQ ID NO:444, respectively, and conservative amino acid substitutions thereof.

[1249] In an embodiment, a 4-1BB agonist antibody comprises a heavy chain that comprises CDR1, CDR2 and CDR3 domains that are each at least 95% identical to the sequences shown in SEQ ID NO:439, SEQ ID NO:440, and SEQ ID NO:441, respectively. In an embodiment, a 4-1BB agonist antibody comprises a heavy chain that comprises CDR1, CDR2 and CDR3 domains that are each at least 90% identical to the sequences shown in SEQ ID NO:439, SEQ ID NO:440, and SEQ ID NO:441, respectively. In an embodiment, a 4-1BB agonist antibody comprises a heavy chain that comprises CDR1, CDR2 and CDR3 domains that are each at least 85% identical to the sequences shown in SEQ ID NO:439, SEQ ID NO:440, and SEQ ID NO:441, respectively. In an embodiment, a 4-1BB agonist antibody comprises a heavy chain that comprises CDR1, CDR2 and CDR3 domains that are each at least 80% identical to the sequences shown in SEQ ID NO:439, SEQ ID NO:440, and SEQ ID NO:441, respectively. In another embodiment, the antibody competes for binding with, and/or binds to the same 4-1BB epitope as the aforementioned antibodies.

[1250] In an embodiment, a 4-1BB agonist antibody comprises a light chain that comprises CDR1, CDR2 and CDR3 domains that are each at least 95% identical to the sequences shown in SEQ ID NO:442, SEQ ID NO:443, and SEQ ID NO:444, respectively. In an embodiment, a 4-1BB agonist antibody comprises a light chain that comprises CDR1, CDR2 and CDR3 domains that are each at least 90% identical to the sequences shown in SEQ ID NO:442, SEQ ID NO:443, and SEQ ID NO:444, respectively. In an embodiment, a 4-1BB agonist antibody comprises a light chain that comprises CDR1, CDR2 and CDR3 domains that are each at least 85% identical to the sequences shown in SEQ ID NO:442, SEQ ID NO:443, and SEQ ID NO:444, respectively. In an embodiment, a 4-1BB agonist antibody comprises a light chain that comprises CDR1, CDR2 and CDR3 domains that are each at least 80% identical to the sequences shown in SEQ ID NO:442, SEQ ID NO:443, and SEQ ID NO:444, respectively. In another embodiment, the antibody competes for binding with, and/or binds to the same 4-1BB epitope as the aforementioned antibodies.

TABLE 4
Amino acid sequences for anti-4-1BB agonist antibodies related to PF-05082566.

| Identifier | Sequence (One-Letter Amino Acid Symbols) | |
|---|---|---|
| SEQ ID NO: 435 | EVQLVQSGAE VKKPGESLRI SCKGSGYSFS TYWISWVRQM PGKGLEWMGK IYPGDSYTNY | 60 |
| heavy chain for | SPSFQGQVTI SADKSISTAY LQWSSLKASD TAMYYCARGY GIFDYWGQGT LVTVSSASTG | 120 |
| 4-1BB monoclonal | PSVFPLAPCS RSTSESTAAL GCLVKDYFPE PVTVSWNSGA LTSGVHTFPA VLQSSGLYSL | 180 |
| antibody PF- | SSVVTVPSSN FGTQTYTCNV DHKPSNTKVD KTVERKCCVE CPPCPAPPVA GPSVFLFPPK | 240 |
| 05082566 | PKDTLMISRT PEVTCVVVDV SHEDPEVQFN WYVDGVEVHN AKTKPREEQF NSTFRVVSVL | 300 |
| | TVVHQDWLNG KEYKCKVSNK GLPAPIEKTI SKTKGQPREP QVYTLPPSRE EMTKNQVSLT | 360 |
| | CLVKGFYPSD IAVEWESNGQ PENNYKTTPP MLDSDGSFFL YSKLTVDKSR WQQGNVFSCS | 420 |
| | VMHEALHNHY TQKSLSLSPG K | 441 |
| SEQ ID NO: 436 | SYELTQPPSV SVSPGQTASI TCSGDNIGDQ YAHWYQQKPG QSPVLVIYQD KNRPSGIPER | 60 |
| light chain for | FSGSNSGNTA TLTISGTQAM DEADYYCATY TGFGSLAVFG GGTKLTVLGQ PKAAPSVTLF | 120 |
| 4-1BB monoclonal | PPSSEELQAN KATLVCLISD FYPGAVTVAW KADSSPVKAG VETTTPSKQS NNKYAASSYL | 180 |
| antibody PF- | SLTPEQWKSH RSYSCQVTHE GSTVEKTVAP TECS | 214 |
| 05082566 | | |
| SEQ ID NO: 437 | EVQLVQSGAE VKKPGESLRI SCKGSGYSFS TYWISWVRQM PGKGLEWMG KIYPGDSYTN | 60 |
| heavy chain | YSPSFQGQVT ISADKSISTA YLQWSSLKAS DTAMYYCARG YGIFDYWGQ GTLVTVSS | 118 |
| variable region | | |
| for 4-1BB | | |
| monoclonal | | |
| antibody PF- | | |
| 05082566 | | |
| SEQ ID NO: 438 | SYELTQPPSV SVSPGQTASI TCSGDNIGDQ YAHWYQQKPG QSPVLVIYQD KNRPSGIPER | 60 |
| light chain | FSGSNSGNTA TLTISGTQAM DEADYYCATY TGFGSLAVFG GGTKLTVL | 108 |
| variable region | | |
| for 4-1BB | | |
| monoclonal | | |
| antibody PF- | | |
| 05082566 | | |
| SEQ ID NO: 439 | STYWIS | 6 |
| heavy chain CDR1 | | |
| for 4-1BB | | |
| monoclonal | | |
| antibody PF- | | |
| 05082566 | | |
| SEQ ID NO: 440 | KIYPGDSYTN YSPSFQG | 17 |
| heavy chain CDR2 | | |
| for 4-1BB | | |
| monoclonal | | |
| antibody PF- | | |
| 05082566 | | |
| SEQ ID NO: 441 | RGYGIFDY | 8 |
| heavy chain CDR3 | | |
| for 4-1BB | | |
| monoclonal | | |
| antibody PF- | | |
| 05082566 | | |
| SEQ ID NO: 442 | SGDNIGDQYA H | 11 |
| light chain CDR1 | | |
| for 4-1BB | | |
| monoclonal | | |
| antibody PF- | | |
| 05082566 | | |
| SEQ ID NO: 443 | QDKNRPS | 7 |
| light chain CDR2 | | |
| for 4-1BB | | |
| monoclonal | | |
| antibody PF- | | |
| 05082566 | | |
| SEQ ID NO: 444 | ATYTGFGSLA V | 11 |
| light chain CDR3 | | |
| for 4-1BB | | |
| monoclonal | | |
| antibody PF- | | |
| 05082566 | | |

[1251] In an embodiment, the 4-1BB agonist is the monoclonal antibody urelumab (BMS-663513, Bristol-Myers Squibb, Inc.), the amino acid sequences of which are set forth in TABLE 5, or biosimilars, antigen-binding fragments, conjugates, or variants thereof. The urelumab IgG4 monoclonal antibody includes a heavy chain given by SEQ ID NO:445 and a light chain given by SEQ ID NO:446 (TABLE 5). In an embodiment, a 4-1BB agonist antibody comprises heavy and light chains having the sequences shown in SEQ ID NO:445 and SEQ ID NO:446, respectively, or antigen binding fragments, Fab fragments, single-chain variable fragments (scFv), variants, or conjugates thereof. In an embodiment, a 4-1BB agonist antibody comprises heavy and light chains that are each at least 99% identical to the sequences shown in SEQ ID NO:445 and SEQ ID NO:446, respectively. In an embodiment, a 4-1BB agonist antibody comprises heavy and light chains that are each at least 98% identical to the sequences shown in SEQ ID NO:445 and SEQ ID NO:446, respectively. In an embodiment, a 4-1BB agonist antibody comprises heavy and light chains that are each at least 97% identical to the sequences shown in SEQ ID NO:445 and SEQ ID NO:446, respectively. In an embodiment, a 4-1BB agonist antibody comprises heavy and light chains that are each at least 96% identical to the sequences shown in SEQ ID NO:445 and SEQ ID NO:446, respectively. In an embodiment, a 4-1BB agonist antibody comprises heavy and light chains that are each at least 95% identical to the sequences shown in SEQ ID NO:445 and SEQ ID NO:446, respectively.

[1252] In some embodiments, the anti-4-1BB antibody comprises a heavy chain comprising SEQ ID NO:445 and a light chain comprising SEQ ID NO:446. In some embodiments, the anti-4-1BB antibody comprises a light chain comprising amino acid residues 21-236 of SEQ ID NO:446 and a heavy chain comprising amino acid residues 20-467 of SEQ ID NO:445. In some embodiments, the 4-1BB antibody comprises a light chain comprising amino acid residues 21-236 of SEQ ID NO:446 and said heavy chain comprises amino acid residues 20-467 of SEQ ID NO:445.

[1253] In an embodiment, a 4-1BB agonist antibody comprises heavy and light chains having the sequences shown in SEQ ID NO:447 and SEQ ID NO:448, respectively, or antigen binding fragments, Fab fragments, single-chain variable fragments (scFv), variants, or conjugates thereof. In an embodiment, a 4-1BB agonist antibody comprises heavy and light chains that are each at least 99% identical to the sequences shown in SEQ ID NO:447 and SEQ ID NO:448, respectively. In an embodiment, a 4-1BB agonist antibody comprises heavy and light chains that are each at least 98% identical to the sequences shown in SEQ ID NO:447 and SEQ ID NO:448, respectively. In an embodiment, a 4-1BB agonist antibody comprises heavy and light chains that are each at least 97% identical to the sequences shown in SEQ ID NO:447 and SEQ ID NO:448, respectively. In an embodiment, a 4-1BB agonist antibody comprises heavy and light chains that are each at least 96% identical to the sequences shown in SEQ ID NO:447 and SEQ ID NO:448, respectively. In an embodiment, a 4-1BB agonist antibody comprises heavy and light chains that are each at least 95% identical to the sequences shown in SEQ ID NO:447 and SEQ ID NO:448, respectively.

[1254] In an embodiment, the 4-1BB agonist antibody comprises the heavy and light chain CDRs or variable regions (VRs) of urelumab. In an embodiment, the 4-1BB agonist antibody heavy chain variable region (V_{H}) comprises the sequence shown in SEQ ID NO:449, and the 4-1BB agonist antibody light chain variable region (V_{L}) comprises the sequence shown in SEQ ID NO:450, and conservative amino acid substitutions thereof. In an embodiment, a 4-1BB agonist antibody comprises V_{H} and V_{L} regions that are each at least 99% identical to the sequences shown in SEQ ID NO:449 and SEQ ID NO:450, respectively. In an embodiment, a 4-1BB agonist antibody comprises V_{H} and V_{L} regions that are each at least 98% identical to the sequences shown in SEQ ID NO:449 and SEQ ID NO:450, respectively. In an embodiment, a 4-1BB agonist antibody comprises V_{H} and V_{L} regions that are each at least 97% identical to the sequences shown in SEQ ID NO:449 and SEQ ID NO:450, respectively. In an embodiment, a 4-1BB agonist antibody comprises V_{H} and V_{L} regions that are each at least 96% identical to the sequences shown in SEQ ID NO:449 and SEQ ID NO:450, respectively. In an embodiment, a 4-1BB agonist antibody comprises V_{H} and V_{L} regions that are each at least 95% identical to the sequences shown in SEQ ID NO:449 and SEQ ID NO:450, respectively.

[1255] In an embodiment, a 4-1BB agonist antibody comprises heavy chain CDR1, CDR2 and CDR3 domains having the sequences set forth in SEQ ID NO:451, SEQ ID NO:452, and SEQ ID NO:453, respectively, and conservative amino acid substitutions thereof, and light chain CDR1, CDR2 and CDR3 domains having the sequences set forth in SEQ ID NO:454, SEQ ID NO:455, and SEQ ID NO:456, respectively, and conservative amino acid substitutions thereof.

[1256] In an embodiment, a 4-1BB agonist antibody comprises a heavy chain that comprises CDR1, CDR2 and CDR3 domains that are each at least 95% identical to the sequences shown in SEQ ID NO:451, SEQ ID NO:452, and SEQ ID NO:453, respectively. In an embodiment, a 4-1BB agonist antibody comprises a heavy chain that comprises CDR1, CDR2 and CDR3 domains that are each at least 90% identical to the sequences shown in SEQ ID NO:451, SEQ ID NO:452, and SEQ ID NO:453, respectively. In an embodiment, a 4-1BB agonist antibody comprises a heavy chain that comprises CDR1, CDR2 and CDR3 domains that are each at least 85% identical to the sequences shown in SEQ ID NO:451, SEQ ID NO:452, and SEQ ID NO:453, respectively. In an embodiment, a 4-1BB agonist antibody comprises a heavy chain that comprises CDR1, CDR2 and CDR3 domains that are each at least 80% identical to the sequences shown in SEQ ID NO:451, SEQ ID NO:452, and SEQ ID NO:453, respectively. In another embodiment, the antibody competes for binding with, and/or binds to the same 4-1BB epitope as the aforementioned antibodies.

[1257] In an embodiment, a 4-1BB agonist antibody comprises a light chain that comprises CDR1, CDR2 and CDR3 domains that are each at least 95% identical to the sequences shown in SEQ ID NO:454, SEQ ID NO:455, and SEQ ID NO:456, respectively. In an embodiment, a 4-1BB agonist antibody comprises a light chain that comprises CDR1, CDR2 and CDR3 domains that are each at least 90% identical to the sequences shown in SEQ ID NO:454, SEQ ID NO:455, and SEQ ID NO:456, respectively. In an embodiment, a 4-1BB agonist antibody comprises a light chain that comprises CDR1, CDR2 and CDR3 domains that are each at least 85% identical to the sequences shown in SEQ ID NO:454, SEQ ID NO:455, and SEQ ID NO:456, respectively. In an embodiment, a 4-1BB agonist antibody comprises a light chain that comprises CDR1, CDR2 and CDR3 domains that are each at least 80% identical to the sequences shown in SEQ ID NO:454, SEQ ID NO:455, and SEQ ID NO:456, respectively. In another embodiment, the antibody competes for binding with, and/or binds to the same 4-1BB epitope as the aforementioned antibodies.

[1258] In an embodiment, the 4-1BB agonist is the monoclonal antibody BMS-663031 (Bristol-Myers Squibb, Inc.), the amino acid sequences of which are set forth in TABLE 5, or biosimilars, antigen-binding fragments, conjugates, or variants thereof. The BMS-663031 IgG1 monoclonal antibody includes a heavy chain given by amino acid residues 20 to 470 of SEQ ID NO:457 and a light chain given by amino acid residues 21 to 236 of SEQ ID NO:446 (TABLE 5). In an embodiment, a 4-1BB agonist antibody comprises heavy and light chains having the sequences shown in amino acid residues 20 to 470 of SEQ ID NO:457 and amino acid residues 21 to 236 of SEQ ID NO:446, respectively, or antigen binding fragments, Fab fragments, single-chain variable fragments (scFv), variants, or conjugates thereof. In an embodiment, a 4-1BB agonist antibody comprises heavy and light chains that are each at least 99% identical to the sequences shown in amino acid residues 20 to 470 of SEQ ID NO:457 and amino acid residues 21 to 236 of SEQ ID NO:446, respectively. In an embodiment, a 4-1BB agonist antibody comprises heavy and light chains that are each at least 98% identical to the sequences shown in amino acid residues 20 to 470 of SEQ ID NO:457 and amino acid residues 21 to 236 of SEQ ID NO:446, respectively. In an embodiment, a 4-1BB agonist antibody comprises heavy and light chains that are each at least 97% identical to the sequences shown in amino acid residues 20 to 470 of SEQ ID NO:457 and amino acid residues 21 to 236 of SEQ ID NO:446, respectively. In an embodiment, a 4-1BB agonist antibody comprises heavy and light chains that are each at least 96% identical to the sequences shown in amino acid residues 20 to 470 of SEQ ID NO:457 and amino acid residues 21 to 236 of SEQ ID NO:446, respectively. In an embodiment, a 4-1BB agonist antibody comprises heavy and light chains that are each at least 95% identical to the sequences shown in amino acid residues 20 to 470 of SEQ ID NO:457 and amino acid residues 21 to 236 of SEQ ID NO:446, respectively.

[1259] In an embodiment, the 4-1BB agonist antibody is a 4-1BB agonist biosimilar monoclonal antibody approved by drug regulatory authorities with reference to urelumab (BMS-663513) or BMS-663031. In an embodiment, the biosimilar monoclonal antibody comprises an 4-1BB antibody comprising an amino acid sequence which has at least 97% sequence identity, e.g., 97%, 98%, 99% or 100% sequence identity, to the amino acid sequence of a reference medicinal product or reference biological product and which comprises one or more post-translational modifications as compared to the reference medicinal product or reference biological product, wherein the reference medicinal product or reference biological product is urelumab (BMS-663513) or BMS-663031. In some embodiments, the one or more post-translational modifications are selected from one or more of: glycosylation, oxidation, deamidation, and truncation. In some embodiments, the biosimilar is a 4-1BB agonist antibody authorized or submitted for authorization, wherein the 4-1BB agonist antibody is provided in a formulation which differs from the formulations of a reference medicinal product or reference biological product, wherein the reference medicinal product or reference biological product is urelumab (BMS-663513) or BMS-663031. The 4-1BB agonist antibody may be authorized by a drug regulatory authority such as the U.S. FDA and/or the European Union's EMA. In some embodiments, the biosimilar is provided as a composition which further comprises one or more excipients, wherein the one or more excipients are the same or different to the excipients comprised in a reference medicinal product or reference biological product, wherein the reference medicinal product or reference biological product is urelumab (BMS-663513) or BMS-663031. In some embodiments, the biosimilar is provided as a composition which further comprises one or more excipients, wherein the one or more excipients are the same or different to the excipients comprised in a reference medicinal product or reference biological product, wherein the reference medicinal product or reference biological product is urelumab (BMS-663513) or BMS-663031.

[1260] In some embodiments, the 4-1BB agonists of the present disclosure include anti-4-1BB monoclonal antibodies with the sequences provided in TABLE 5, which include those recited in U.S. Pat. No. 7,288,638, the disclosures of which are incorporated by reference herein, such as urelumab (also known as 20H4.9-IgG4, BMS-663513, and 10C7) or 20H4.9-IgG1 (BMS-663031).

TABLE 5
Amino acid sequences for anti-4-1BB agonist antibodies related to urelumab
(BMS-663513) and BMS-663031.

| Identifier | Sequence (One-Letter Amino Acid Symbols) | |
|---|---|---|
| SEQ ID NO: 445 | MKHLWFFLLL VAAPRWVLSQ VQLQQWGAGL LKPSETLSLT CAVYGGSFSG YYWSWIRQSP | 60 |
| heavy chain for | EKGLEWIGEI NHGGYVTYNP SLESRVTISV DTSKNQFSLK LSSVTAADTA VYYCARDYGP | 120 |
| monoclonal | GNYDWYFDLW GRGTLVTVSS ASTKGPSVFP LAPCSRSTSE STAALGCLVK DYFPEPVTVS | 180 |
| antibody | WNSGALTSGV HTFPAVLQSS GLYSLSSVVT VPSSSLGTKT YTCNVDHKPS NTKVDKRVES | 240 |
| 20H4.9.h4a | KYGPPCPPCP APEFLGGPSV FLFPPKPKDT LMISRTPEVT CVVVDVSQED PEVQFNWYVD | 300 |
| (urelumab) | GVEVHNAKTK PREEQFNSTY RVVSVLTVLH QDWLNGKEYK CKVSNKGLPS SIEKTISKAK | 360 |
| | GQPREPQVYT LPPSQEEMTK NQVSLTCLVK GFYPSDIAVE WESNGQPENN YKTTPPVLDS | 420 |
| | DGSFFLYSRL TVDKSRWQEG NVFSCSVMHE ALHNHYTQKS LSLSLGK | 467 |
| SEQ ID NO: 446 | MEAPAQLLFL LLLWLPDTTG EIVLTQSPAT LSLSPGERAT LSCRASQSVS SYLAWYQQKP | 60 |
| light chain for | GQAPRLLIYD ASNRATGIPA RFSGSGSGTD FTLTISSLEP EDFAVYYCQQ RSNWPPALTF | 120 |
| monoclonal | GGGTKVEIKR TVAAPSVFIF PPSDEQLKSG TASVVCLLNN FYPREAKVQW KVDNALQSGN | 180 |
| antibody | SQESVTEQDS KDSTYSLSST LTLSKADYEK HKVYACEVTH QGLSSPVTKS FNRGEC | 236 |
| 20H4.9. LC | | |
| (urelumab) | | |
| SEQ ID NO: 447 | QVQLQQWGAG LLKPSETLSL TCAVYGGSFS GYYWSWIRQS PEKGLEWIGE INHGGYVTYN | 60 |
| heavy chain for | PSLESRVTIS VDTSKNQFSL KLSSVTAADT AVYYCARDYG PGNYDWYFDL WGRGTLVTVS | 120 |
| monoclonal | SASTKGPSVF PLAPCSRSTS ESTAALGCLV KDYFPEPVTV SWNSGALTSG VHTFPAVLQS | 180 |
| antibody | SGLYSLSSVV TVPSSSLGTK TYTCNVDHKP SNTKVDKRVE SKYGPPCPPC PAPEFLGGPS | 240 |
| 20H4.9.h4a | VFLFPPKPKD TLMISRTPEV TCVVVDVSQE DPEVQFNWYV DGVEVHNAKT KPREEQFNST | 300 |
| (urelumab) | YRVVSVLTVL HQDWLNGKEY KCKVSNKGLP SSIEKTISKA KGQPREPQVY TLPPSQEEMT | 360 |
| | KNQVSLTCLV KGFYPSDIAV EWESNGQPEN NYKTTPPVLD SDGSFFLYSR LTVDKSRWQE | 420 |
| | GNVFSCSVMH EALHNHYTQK SLSLSLGK | 448 |
| SEQ ID NO: 448 | EIVLTQSPAT LSLSPGERAT LSCRASQSVS SYLAWYQQKP GQAPRLLIYD ASNRATGIPA | 60 |
| light chain for | RFSGSGSGTD FTLTISSLEP EDFAVYYCQQ RSNWPPALTF CGGTKVEIKR TVAAPSVFIF | 120 |
| monoclonal | PPSDEQLKSG TASVVCLLNN FYPREAKVQW KVDNALQSGN SQESVTEQDS KDSTYSLSST | 180 |
| antibody | LTLSKADYEK HKVYACEVTH QGLSSPVTKS FNRGEC | 216 |
| 20H4.9. LC | | |
| (urelumab) | | |
| SEQ ID NO: 449 | MKHLWFFLLL VAAPRWVLSQ VQLQQWGAGL LKPSETLSLT CAVYGGSFSG YYWSWIRQSP | 60 |
| variable heavy | EKGLEWIGEI NHGGYVTYNP SLESRVTISV DTSKNQFSLK LSSVTAADTA VYYCARDYGP | 120 |
| chain for | | |
| monoclonal | | |
| antibody | | |
| 20H4.9.h4a | | |
| (urelumab) | | |
| SEQ ID NO: 450 | MEAPAQLLFL LLLWLPDTTG EIVLTQSPAT LSLSPGERAT LSCRASQSVS SYLAWYQQKP | 60 |
| variable light | GQAPRLLIYD ASNRATGIPA RFSGSGSGTD FTLTISSLEP EDFAVYYCQQ | 110 |
| chain for | | |
| monoclonal | | |
| antibody | | |
| 20H4.9. LC | | |
| (urelumab) | | |
| SEQ ID NO: 451 | GYYWS | 5 |
| heavy chain CDR1 | | |
| for monoclonal | | |
| antibody | | |
| 20H4.9.h4a | | |
| (urelumab) | | |
| SEQ ID NO: 452 | EINHGGYVTY NPSLES | 16 |
| heavy chain CDR2 | | |
| for monoclonal | | |
| antibody | | |
| 20H4.9.h4a | | |
| (urelumab) | | |
| SEQ ID NO: 453 | DYGPGNYDWY FDL | 13 |
| heavy chain CDR3 | | |
| for monoclonal | | |
| antibody | | |
| 20H4.9.h4a | | |
| (urelumab) | | |
| SEQ ID NO: 454 | RASQSVSSYL A | 11 |
| light chain CDR1 | | |
| monoclonal | | |
| antibody | | |
| 20H4.9. LC | | |
| (urelumab) | | |
| SEQ ID NO: 455 | DASNRAT | 7 |
| light chain CDR2 | | |
| for monoclonal | | |
| antibody | | |
| 20H4.9. LC | | |
| (urelumab) | | |
| SEQ ID NO: 456 | QQRSDWPPAL T | 11 |
| light chain CDR3 | | |
| for monoclonal | | |
| antibody | | |
| 20H4.9. LC | | |
| (urelumab) | | |
| SEQ ID NO: 457 | MKHLWFFLLL VAAPRWVLSQ VQLQQWGAGL LKPSETLSLT CAVYGGSFSG YYWSWIRQSP | 60 |
| 20H4.9-IgG1 | EKGLEWIGEI NHGGYVTYNP SLESRVTISV DTSKNQFSLK LSSVTAADTA VYYCARDYGP | 120 |
| amino acid | GNYDWYFDLW GRGTLVTVSS ASTKGPSVFP LAPSSKSTSG GTAALGCLVK DYFPEPVTVS | 180 |
| sequence | WNSGALTSGV HTFPAVLQSS GLYSLSSVVT VPSSSLGTQT YICNVNHKPS NTKVDKRVEP | 240 |
| | KSCDKTHTCP PCPAPELLGG PSVFLFPPKP KDTLMISRTP EVTCVVVDVS HEDPEVKFNW | 300 |
| | YVDGVEVHNA KTKPREEQYN STYRVVSVLT VLHQDWLNGK EYKCKVSNKA LPAPIEKTIS | 360 |
| | KAKGQPREPQ VYTLPPSRDE LTKNQVSLTC LVKGFYPSDI AVEWESNGQP ENNYKTTPPV | 420 |
| | LDSDGSFFLY SKLTVDKSRW QQGNVFSCSV MHEALHNHYT QKSLSLSPGK | 470 |

[1261] In some embodiments, the 4-1BB agonists of the present disclosure include anti-4-1BB monoclonal antibodies with the amino acid sequences provided in TABLE 6, which include those recited for the antibodies disclosed in U.S. Pat. No. 6,887,673; U.S. Pat. No. 7,214,493; U.S. Pat. No. 6,303,121; U.S. Pat. No. 6,569,997; and U.S. Pat. No. 6,905,685 (4E9 or BMS-554271); all of which are incorporated by reference herein in their entireties for all purposes.

[1262] In an embodiment, a 4-1BB agonist antibody comprises heavy and light chains having the sequences shown in SEQ ID NO:458 and SEQ ID NO:459, respectively, or antigen binding fragments, Fab fragments, single-chain variable fragments (scFv), variants, or conjugates thereof. In an embodiment, a 4-1BB agonist antibody comprises heavy and light chains that are each at least 99% identical to the sequences shown in SEQ ID NO:458 and SEQ ID NO:459, respectively. In an embodiment, a 4-1BB agonist antibody comprises heavy and light chains that are each at least 98% identical to the sequences shown in SEQ ID NO:458 and SEQ ID NO:459, respectively. In an embodiment, a 4-1BB agonist antibody comprises heavy and light chains that are each at least 97% identical to the sequences shown in SEQ ID NO:458 and SEQ ID NO:459, respectively. In an embodiment, a 4-1BB agonist antibody comprises heavy and light chains that are each at least 96% identical to the sequences shown in SEQ ID NO:458 and SEQ ID NO:459, respectively. In an embodiment, a 4-1BB agonist antibody comprises heavy and light chains that are each at least 95% identical to the sequences shown in SEQ ID NO:458 and SEQ ID NO:459, respectively.

[1263] In an embodiment, a 4-1BB agonist antibody comprises heavy chain CDR1, CDR2 and CDR3 domains having the sequences set forth in SEQ ID NO:460, SEQ ID NO:461, and SEQ ID NO:462, respectively, and conservative amino acid substitutions thereof, and light chain CDR1, CDR2 and CDR3 domains having the sequences set forth in SEQ ID NO:463, SEQ ID NO:464, and SEQ ID NO:465, respectively, and conservative amino acid substitutions thereof.

[1264] In an embodiment, a 4-1BB agonist antibody comprises a heavy chain that comprises CDR1, CDR2 and CDR3 domains that are each at least 95% identical to the sequences shown in SEQ ID NO:460, SEQ ID NO:461, and SEQ ID NO:462, respectively. In an embodiment, a 4-1BB agonist antibody comprises a heavy chain that comprises CDR1, CDR2 and CDR3 domains that are each at least 90% identical to the sequences shown in SEQ ID NO:460, SEQ ID NO:461, and SEQ ID NO:462, respectively. In an embodiment, a 4-1BB agonist antibody comprises a heavy chain that comprises CDR1, CDR2 and CDR3 domains that are each at least 85% identical to the sequences shown in SEQ ID NO:460, SEQ ID NO:461, and SEQ ID NO:462, respectively. In an embodiment, a 4-1BB agonist antibody comprises a heavy chain that comprises CDR1, CDR2 and CDR3 domains that are each at least 80% identical to the sequences shown in SEQ ID NO:460, SEQ ID NO:461, and SEQ ID NO:462, respectively. In another embodiment, the antibody competes for binding with, and/or binds to the same 4-1BB epitope as the aforementioned antibodies.

[1265] In an embodiment, a 4-1BB agonist antibody comprises a light chain that comprises CDR1, CDR2 and CDR3 domains that are each at least 95% identical to the sequences shown in SEQ ID NO:463, SEQ ID NO:464, and SEQ ID NO:465, respectively. In an embodiment, a 4-1BB agonist antibody comprises a light chain that comprises CDR1, CDR2 and CDR3 domains that are each at least 90% identical to the sequences shown in SEQ ID NO:463, SEQ ID NO:464, and SEQ ID NO:465, respectively. In an embodiment, a 4-1BB agonist antibody comprises a light chain that comprises CDR1, CDR2 and CDR3 domains that are each at least 85% identical to the sequences shown in SEQ ID NO:463, SEQ ID NO:464, and SEQ ID NO:465, respectively. In an embodiment, a 4-1BB agonist antibody comprises a light chain that comprises CDR1, CDR2 and CDR3 domains that are each at least 80% identical to the sequences shown in SEQ ID NO:463, SEQ ID NO:464, and SEQ ID NO:465, respectively. In another embodiment, the antibody competes for binding with, and/or binds to the same 4-1BB epitope as the aforementioned antibodies.

TABLE 6
Amino acid sequences for selected anti-4-1BB agonist antibodies.

| Identifier | Sequence (One-Letter Amino Acid Symbols) | |
|---|---|---|
| SEQ ID NO: 458 | MDWTWRILFL VAAATGAHSE VQLVESGGGL VQPGGSLRLS CAASGFTFSD YWMSWVRQAP | 60 |
| heavy chain for | GKGLEWVADI KNDGSYTNYA PSLTNRFTIS RDNAKNSLYL QMNSLRAEDT AVYYCARELT | 120 |
| monoclonal | GTWGQGTMVT VSSASTKGPS VFPLAPCSRS TSESTAALGC LVKDYFPEPV TVSWNSGALT | 180 |
| antibody H39E3- | SGVHTFPAVL QSSGLYSLSS VVTVPSSSLG TKTYTCNVDH KPSNTKVDKR VESKYGPPCP | 240 |
| 2.h4a | PCPAPEFLGG PSVFLFPPKP KDTLMISRTP EVTCVVVDVS QEDPEVQFNW YVDGVEVHNA | 300 |
| | KTKPREEQFN STYRVVSVLT VLHQDWLNGK EYKCKVSNKG LPSSIEKTIS KAKGQPREPQ | 360 |
| | VYTLPPSQEE MTKNQVSLTC LVKGFYPSDI AVEWESNGQP ENNYKTTPPV LDSDGSFFLY | 420 |
| | SRLTVDKSRW QEGNVFSCSV MHEALHNHYT QKSLSLSLGK | 460 |
| SEQ ID NO: 459 | MEAPAQLLFL LLLWLPDTTG DIVMTQSPDS LAVSLGERAT INCKSSQSLL SSGNQKNYL | 60 |
| light chain for | WYQQKPGQPP KLLIYYASTR QSGVPDRFSG SGSGTDFTLT ISSLQAEDVA VYYCLQYDRY | 120 |
| monoclonal | PFTFGQGTKL EIKRTVAAPS VFIFPPSDEQ LKSGTASVVC LLNNFYPREA KVQWKVDNAL | 180 |
| antibody | QSGNSQESVT EQDSKDSTYS LSSTLTLSKA DYEKHKVYAC EVTHQGLSSP VTKSFNRGEC | 240 |
| H39E3.L1 | | |
| SEQ ID NO: 460 | DYWMS | 5 |
| heavy chain CDR1 | | |
| for monoclonal | | |
| antibody H39E3- | | |
| 2.h4a | | |
| SEQ ID NO: 461 | DIKNDGSYTN YAPSLTN | 17 |
| heavy chain CDR2 | | |
| for monoclonal | | |
| antibody H39E3- | | |
| 2.h4a | | |
| SEQ ID NO: 462 | ELTGT | 5 |
| heavy chain CDR3 | | |
| for monoclonal | | |
| antibody H39E3- | | |
| 2.h4a | | |
| SEQ ID NO: 463 | KSSQSLLSSG NQKNYLA | 17 |
| light chain CDR1 | | |
| for monoclonal | | |
| antibody | | |
| H39E3.L1 | | |
| SEQ ID NO: 464 | YASTRQS | 7 |
| light chain CDR2 | | |
| for monoclonal | | |
| antibody | | |
| H39E3.L1 | | |
| SEQ ID NO: 465 | LQYDRYPFT | 9 |
| light chain CDR3 | | |
| for monoclonal | | |
| antibody | | |
| H39E3.L1 | | |

[1266] In some embodiments, the 4-1BB agonists of the present disclosure include anti-4-1BB monoclonal antibodies with the sequences provided in TABLE 7, which include those recited in U.S. Pat. No. 5,928,893; incorporated by reference herein in its entirety for all purposes.

[1267] In an embodiment, the 4-1BB agonist antibody heavy chain variable region (V_{H}) comprises a sequence selected from the group consisting of SEQ ID NO:468 and SEQ ID NO:469, or conservative amino acid substitutions thereof, and the 4-1BB agonist antibody light chain variable region (V_{L}) comprises a sequence selected from the group consisting of SEQ ID NO:466 and SEQ ID NO:467, or conservative amino acid substitutions thereof.

[1268] In some embodiments, the anti-4-1BB antibody comprises a light chain comprising SEQ ID NO:466, or conservative amino acid substitutions thereof, and a heavy chain comprising SEQ ID NO:468, or conservative amino acid substitutions thereof. In some embodiments, the anti-4-1BB antibody comprises a light chain comprising SEQ ID NO:466, or conservative amino acid substitutions thereof, and a heavy chain comprising SEQ ID NO:469, or conservative amino acid substitutions thereof. In some embodiments, the anti-4-1BB antibody comprises a light chain comprising SEQ ID NO:467, or conservative amino acid substitutions thereof, and a heavy chain comprising SEQ ID NO:468, or conservative amino acid substitutions thereof. In some embodiments, the anti-4-1BB antibody comprises a light chain comprising SEQ ID NO:467, or conservative amino acid substitutions thereof, and a heavy chain comprising SEQ ID NO:469, or conservative amino acid substitutions thereof.

[1269] In an embodiment, a 4-1BB agonist antibody comprises light chain CDR1, CDR2 and CDR3 domains having the sequences set forth in SEQ ID NO:470, SEQ ID NO:471, and SEQ ID NO:472, respectively, and conservative amino acid substitutions thereof, and heavy chain CDR1, CDR2 and CDR3 domains having the sequences set forth in SEQ ID NO:473 or SEQ ID NO:474, SEQ ID NO:475 or SEQ ID NO:476, and SEQ ID NO:477, respectively, and conservative amino acid substitutions thereof.

TABLE 7
Amino acid sequences of selected anti-4-1BB agonist antibodies.

| Identifier | Sequence (One-Letter Amino Acid Symbols) | |
|---|---|---|
| SEQ ID NO: 466 | DIVMTQSPAT QSVTPGDRVS LSCRASQTIS DYLHWYQQKS HESPRLLIKY ASQSISGIPS | 60 |
| light chain | RFSGSGSGSD FTLSINSVEP EDVGVYYCQD GHSFPPTFGG GTKLEIK | 107 |
| variable region | | |
| version 1 for | | |
| monoclonal | | |
| antibody 4B4-1-1 | | |
| SEQ ID NO: 467 | DIVMTQSPAT QSVTPGDRVS LSCRASQTIS DYLHWYQQKS HESPRLLIKY ASQSISGIPS | 60 |
| light chain | RFSGSGSGSD FTLSINSVEP EDVGVYYCQD GHSFPPTFGG GTKLEIKR | 108 |
| variable region | | |
| version 2 for | | |
| monoclonal | | |
| antibody 4B4-1-1 | | |
| SEQ ID NO: 468 | QVQLQQPGAE LVKPGASVKL SCKASGYTFS SYWMHWVKQR PGQVLEWIGE INPGNGHTNY | 60 |
| heavy chain | NEKFKSKATL TVDKSSSTAY MQLSSLTSED SAVYYCARSF TTARGFAYWG QGTLVTVS | 118 |
| variable region | | |
| version 1 for | | |
| monoclonal | | |
| antibody 4B4-1-1 | | |
| SEQ ID NO: 469 | QVQLQQPGAE LVKPGASVKL SCKASGYTFS SYWMHWVKQR PGQVLEWIGE INPGNGHTNY | 60 |
| heavy chain | NEKFKSKATL TVDKSSSTAY MQLSSLTSED SAVYYCARSF TTARGFAYWG QGTLVTVSA | 119 |
| variable region | | |
| version 2 for | | |
| monoclonal | | |
| antibody 4B4-1-1 | | |
| SEQ ID NO: 470 | ASQTISDYLH WY | 12 |
| light chain CDR1 | | |
| for monoclonal | | |
| antibody 4B4-1-1 | | |
| SEQ ID NO: 471 | ASQSIS | 6 |
| light chain CDR2 | | |
| for monoclonal | | |
| antibody 4B4-1-1 | | |
| SEQ ID NO: 472 | QDGHSFPP | 8 |
| light chain CDR3 | | |
| for monoclonal | | |
| antibody 4B4-1-1 | | |
| SEQ ID NO: 473 | SSYWMH | 6 |
| heavy chain CDR1 | | |
| version 1 for | | |
| monoclonal | | |
| antibody 4B4-1-1 | | |
| SEQ ID NO: 474 | SYWMH | 5 |
| heavy chain CDR1 | | |
| version 2 for | | |
| monoclonal | | |
| antibody 4B4-1-1 | | |
| SEQ ID NO: 475 | GEINPGNGHT NYNEKFKS | 18 |
| heavy chain CDR2 | | |
| version 1 for | | |
| monoclonal | | |
| antibody 4B4-1-1 | | |
| SEQ ID NO: 476 | EINPGNGHTN YNEKFKS | 17 |
| heavy chain CDR2 | | |
| version 2 for | | |
| monoclonal | | |
| antibody 4B4-1-1 | | |
| SEQ ID NO: 477 | SFTTARGFAY | 10 |
| heavy chain CDR3 | | |
| for monoclonal | | |
| antibody 4B4-1-1 | | |

[1270] In some embodiments, the anti-4-1BB antibodies of the present disclosure include antibodies disclosed in U.S. Pat. No. 6,362,325 (1D8 or BMS-469492; 3H3 or BMS-469497; or 3El), the disclosures of each of which are incorporated by reference herein.

[1271] In some embodiments, the anti-4-1BB antibodies of the present disclosure include antibodies disclosed in U.S. Pat. No. 6,974,863 (such as the antibody produced from hybridoma 53A2), the disclosures of each of which are incorporated by reference herein.

[1272] In some embodiments, the anti-4-1BB antibodies of the present disclosure include antibodies disclosed in U.S. Pat. No. 6,210,669 (such as antibodies 1D8, 3B8, or 3E1), the disclosures of each of which are incorporated by reference herein.

[1273] In an embodiment, an anti-4-1BB antibody selected from the group consisting of PF-05082566 (Pfizer), 1D8, 3Elor, 20H4.9-IgG4 (10C7 or BMS-663513; urelumab), 4B4 (BioLegend 309809), H4-1BB-M127 (BD Pharmingen 552532), BBK2 (Thermo Fisher MS621PABX), 145501 (Leinco Technologies B591), antibody produced by cell line deposited as ATCC No. HB-11248, 5F4 (BioLegend 31 1503), C65-485 (BD Pharmingen 559446), 20H4.9-IgG1 (BMS-663031), 4E9, BMS-554271, BMS-469492, 3H3, BMS-469497, 3E1, 53A2, and 3B8, and/or Fab fragments, antigen-binding fragments, derivatives, conjugates, variants, and radioisotope-labeled complexes thereof, is administered to a subject by infusing a dose selected from the group consisting of about 5 mg, about 8 mg, about 10 mg, about 20 mg, about 25 mg, about 50 mg, about 75 mg, 100 mg, about 200 mg, about 300 mg, about 400 mg, about 500 mg, about 600 mg, about 700 mg, about 800 mg, about 900 mg, about 1000 mg, about 1100 mg, about 1200 mg, about 1300 mg, about 1400 mg, about 1500 mg, about 1600 mg, about 1700 mg, about 1800 mg, about 1900 mg, and about 2000 mg. In an embodiment, the anti-4-1BB antibody is administered weekly. In an embodiment, the anti-4-1BB antibody is administered every two weeks. In an embodiment, the anti-4-1BB antibody is administered every three weeks. In an embodiment, the anti-4-1BB antibody is administered monthly. In an embodiment, the anti-4-1BB antibody is administered intravenously in a dose of 8 mg given every three weeks for 4 doses over a 12-week period. In an embodiment, the anti-4-1BB antibody is administered at a lower initial dose, which is escalated when administered at subsequent intervals administered monthly. For example, the first infusion can deliver 300 mg of anti-4-1BB antibody, and subsequent weekly doses could deliver 2,000 mg of anti-4-1BB antibody for eight weeks, followed by monthly doses of 2,000 mg of anti-4-1BB antibody. During any of the foregoing embodiments, the BTK inhibitors and 4-1BB agonists of the present invention may be administered daily, twice daily, or at different intervals as described above, at the dosages described above.

[1274] In an embodiment, the invention provides a kit comprising a first composition comprising a BTK inhibitor and a second composition comprising an anti-4-1BB antibody selected from the group consisting of PF-05082566 (Pfizer), 1D8, 3Elor, 20H4.9-IgG4 (10C7 or BMS-663513; urelumab), 4B4 (BioLegend 309809), H4-1BB-M127 (BD Pharmingen 552532), BBK2 (Thermo Fisher MS621PABX), 145501 (Leinco Technologies B591), antibody produced by cell line deposited as ATCC No. HB-11248, 5F4 (BioLegend 31 1503), C65-485 (BD Pharmingen 559446), 20H4.9-IgG1 (BMS-663031), 4E9, BMS-554271, BMS-469492, 3H3, BMS-469497, 3E1, 53A2, and 3B8, and/or a Fab fragment, an antigen-binding fragment, derivative, conjugate, variant, or radioisotope-labeled complex thereof, for use in the treatment of CLL or SLL, hematological malignancies, B cell malignancies, solid tumors, or any of the other diseases described herein. The compositions are typically both pharmaceutical compositions. The kit is for use in co-administration of the anti-4-1BB antibody and the BTK inhibitor, either simultaneously or separately, in the treatment of CLL or SLL, hematological malignancies, B cell malignancies, or any of the other diseases described herein.

[1275] In an embodiment, the 4-1BB agonist is a 4-1BB biosimilar monoclonal antibody approved by drug regulatory authorities with reference to any of the foregoing 4-1BB agonists. In an embodiment, the biosimilar comprises a 4-1BB agonist antibody, fusion protein, or other biological compound comprising an amino acid sequence which has at least 97% sequence identity, e.g., 97%, 98%, 99%, or 100% sequence identity, to the amino acid sequence of a reference medicinal product or reference biological product and which comprises one or more post-translational modifications as compared to the reference medicinal product or reference biological product, wherein the reference medicinal product or reference biological product is any of the foregoing 4-1BB agonists. In some embodiments, the one or more post-translational modifications are selected from one or more of: glycosylation, oxidation, deamidation, and truncation. In some embodiments, the biosimilar is a 4-1BB agonist authorized or submitted for authorization, wherein the 4-1BB agonist is provided in a formulation which differs from the formulations of a reference medicinal product or reference biological product, wherein the reference medicinal product or reference biological product is any of the foregoing 4-1BB agonist. The 4-1BB agonist antibody may be authorized by a drug regulatory authority such as the U.S. FDA and/or the European Union's EMA. In some embodiments, the biosimilar is provided as a composition which further comprises one or more excipients, wherein the one or more excipients are the same or different to the excipients comprised in a reference medicinal product or reference biological product, wherein the reference medicinal product or reference biological product is any of the foregoing 4-1BB agonist. In some embodiments, the biosimilar comprises one or more excipients selected from tris-hydrochloride, sodium chloride, mannitol, pentetic acid, polysorbate 80, sodium hydroxide, and hydrochloric acid.

### OX40 Agonists

[1276] In an embodiment, the invention provides a method of treating a hyperproliferative disease, comprising co-administering, to a mammal in need thereof, therapeutically effective amounts of (1) a BTK inhibitor or a pharmaceutically acceptable salt, solvate, hydrate, cocrystal, or prodrug thereof and (2) an OX40 agonist, or a fragment, derivative, conjugate, variant, or biosimilar thereof. In preferred embodiments, the OX40 agonist is selected from the group consisting of MEDI6469 (MedImmune), MEDI0562 (MedImmune), MEDI6383 (MedImmune), MOXR0916 (also referred to as RG7888, Genentech), GSK3174998, and fragments, derivatives, conjugates, variants, and biosimilars thereof. An OX40 agonist, also referred to as an anti-OX40 agonist, is capable of binding to human or mammalian OX40 and may be any OX40 agonist known in the art. In particular, it is one of the OX40 agonists described in more detail in the following paragraphs. In preferred embodiments, the compositions described herein provide a combination of an OX40 agonist with a BTK inhibitor, or methods of using a combination of an OX40 agonist with a BTK inhibitor.

[1277] The OX40 agonist may be any OX40 binding molecule inhibitor known in the art. The OX40 binding molecule may be a monoclonal antibody or fusion protein capable of binding to OX40. The OX40 agonists or OX40 binding molecules may comprise an immunoglobulin heavy chain of any isotype (e.g., IgG, IgE, IgM, IgD, IgA, and IgY), class (e.g., IgG1, IgG2, IgG3, IgG4, IgA1 and IgA2) or subclass of immunoglobulin molecule. The OX40 agonist may have both a heavy and a light chain. As used herein, the term binding molecule also includes antibodies (including full length antibodies), monoclonal antibodies (including full length monoclonal antibodies), polyclonal antibodies, multispecific antibodies (e.g., bispecific antibodies), human, humanized or chimeric antibodies, and antibody fragments, e.g., Fab fragments, F(ab′) fragments, fragments produced by a Fab expression library, epitope-binding fragments of any of the above, and engineered forms of antibodies, e.g., scFv molecules, that bind to OX40. The OX40 agonist or binding molecules may also be a fusion protein. In an embodiment, the OX40 agonist is an antigen binding protein that is a fully human antibody. In an embodiment, the OX40 agonist is an antigen binding protein that is a humanized antibody. In some embodiments, OX40 agonists for use in the presently disclosed methods and compositions include anti-OX40 antibodies, human anti-OX40 antibodies, mouse anti-OX40 antibodies, mammalian anti-OX40 antibodies, monoclonal anti-OX40 antibodies, polyclonal anti-OX40 antibodies, chimeric anti-OX40 antibodies, anti-OX40 adnectins, anti-OX40 domain antibodies, single chain anti-OX40 fragments, heavy chain anti-OX40 fragments, light chain anti-OX40 fragments, anti-OX40 fusion proteins, and fragments, derivatives, conjugates, variants, or biosimilars thereof.

[1278] In a preferred embodiment, the OX40 agonist is an agonistic, anti-OX40 monoclonal antibody (i.e., an antibody derived from a single cell line). Agonistic OX40 antibodies are known to induce strong immune responses. Curti, et al., Cancer Res. 2013, 73, 7189-98. In a preferred embodiment, the OX40 agonist is a monoclonal antibody that binds specifically to OX40 antigen. In some embodiments, the OX40 agonist is an agonistic, anti-OX40 monoclonal antibody that abrogates antibody-dependent cellular toxicity (ADCC), for example NK cell cytotoxicity. In some embodiments, the OX40 agonist is an agonistic, anti-OX40 monoclonal antibody that abrogates antibody-dependent cell phagocytosis (ADCP). In some embodiments, the OX40 agonist is an agonistic, anti-OX40 monoclonal antibody that abrogates complement-dependent cytotoxicity (CDC). In some embodiments, the OX40 agonist is an agonistic, anti-OX40 monoclonal antibody which abrogates Fc region functionality.

[1279] In some embodiments, the OX40 agonists are characterized by binding to human OX40 (SEQ ID NO:478) with high affinity and agonistic activity. In an embodiment, the OX40 agonist is a binding molecule that binds to human OX40 (SEQ ID NO:478). In an embodiment, the OX40 agonist is a binding molecule that binds to murine OX40 (SEQ ID NO:479). The amino acid sequences of OX40 antigen to which an OX40 agonist or binding molecule binds are summarized in Table 8.

TABLE 8
Amino acid sequences of OX40 antigens.

| Identifier | Sequence (One-Letter Amino Acid Symbols) | |
|---|---|---|
| SEQ ID NO: 478 | MGNSCYNIVA TLLLVLNFER TRSLQDPCSN CPAGTFCDNN RNQICSPCPP NSFSSAGGQR | 60 |
| human OX40 | TCDICRQCKG VFRTRKECSS TSNAECDCTP GFHCLGAGCS MCEQDCKQGQ ELTKKGCKDC | 120 |
| (Homo sapiens) | CFGTFNDQKR GICRPWTNCS LDGKSVLVNG TKERDVVCGP SPADLSPGAS SVTPPAPARE | 180 |
| | PGHSPQIISF FLALTSTALL FLLFFLTLRF SVVKRGRKKL LYIFKQPFMR PVQTTQEEDG | 240 |
| | CSCRFPEEEE GGCEL | 255 |
| SEQ ID NO: 479 | MGNNCYNVVV IVLLLVGCEK VGAVQNSCDN CQPGTFCRKY NPVCKSCPPS TFSSIGGQPN | 60 |
| murine OX40 | CNICRVCAGY FRFKKFCSST HNAECECIEG FHCLGPQCTR CEKDCRPGQE LTKQGCKTCS | 120 |
| (Mus musculus) | LGTFNDQNGT GVCRPWTNCS LDGRSVLKTG TTEKDVVCGP PVVSFSPSTT ISVTPEGGPG | 180 |
| | GHSLQVLTLF LALTSALLLA LIFITLLFSV LKWIRKKFPH IFKQPFKKTT GAAQEEDACS | 240 |
| | CRCPQEEEGG GGGYEL | 256 |

[1280] In some embodiments, the compositions and methods described include a OX40 agonist that binds human or murine OX40 with a K_{D} of about 100 pM or lower, binds human or murine OX40 with a K_{D} of about 90 pM or lower, binds human or murine OX40 with a K_{D} of about 80 pM or lower, binds human or murine OX40 with a K_{D} of about 70 pM or lower, binds human or murine OX40 with a K_{D} of about 60 pM or lower, binds human or murine OX40 with a K_{D} of about 50 pM or lower, binds human or murine OX40 with a K_{D} of about 40 pM or lower, or binds human or murine OX40 with a K_{D} of about 30 pM or lower.

[1281] In some embodiments, the compositions and methods described include a OX40 agonist that binds to human or murine OX40 with a k_{assoc} of about 7.5×10⁵ l/M·s or faster, binds to human or murine OX40 with a k_{assoc} of about 7.5×10⁵ l/M·s or faster, binds to human or murine OX40 with a k_{assoc} of about 8×10⁵ l/M·s or faster, binds to human or murine OX40 with a k_{assoc} of about 8.5×10⁵ l/M·s or faster, binds to human or murine OX40 with a k_{assoc} of about 9×10⁵ l/M·s or faster, binds to human or murine OX40 with a k_{assoc} of about 9.5×10⁵ 1/M·s or faster, or binds to human or murine OX40 with a k_{assoc} of about 1×10⁶ l/M·s or faster.

[1282] In some embodiments, the compositions and methods described include a OX40 agonist that binds to human or murine OX40 with a k_{dissoc} of about 2×10⁻⁵ l/s or slower, binds to human or murine OX40 with a k_{dissoc} of about 2.1×10⁻⁵ l/s or slower, binds to human or murine OX40 with a k_{dissoc} of about 2.2×10⁻⁵ l/s or slower, binds to human or murine OX40 with a k_{dissoc} of about 2.3×10⁻⁵ l/s or slower, binds to human or murine OX40 with a k_{dissoc} of about 2.4×10⁻⁵ l/s or slower, binds to human or murine OX40 with a k_{dissoc} of about 2.5×10⁻⁵ l/s or slower, binds to human or murine OX40 with a k_{dissoc} of about 2.6×10⁻⁵ l/s or slower or binds to human or murine OX40 with a k_{dissoc} of about 2.7×10⁻⁵ l/s or slower, binds to human or murine OX40 with a k_{dissoc} of about 2.8×10⁻⁵ l/s or slower, binds to human or murine OX40 with a k_{dissoc} of about 2.9×10⁻⁵ l/s or slower, or binds to human or murine OX40 with a k_{dissoc} of about 3×10⁻⁵ l/s or slower.

[1283] In some embodiments, the compositions and methods described include OX40 agonist that binds to human or murine OX40 with an IC₅₀ of about 10 nM or lower, binds to human or murine OX40 with an IC₅₀ of about 9 nM or lower, binds to human or murine OX40 with an IC₅₀ of about 8 nM or lower, binds to human or murine OX40 with an IC₅₀ of about 7 nM or lower, binds to human or murine OX40 with an IC₅₀ of about 6 nM or lower, binds to human or murine OX40 with an IC₅₀ of about 5 nM or lower, binds to human or murine OX40 with an IC₅₀ of about 4 nM or lower, binds to human or murine OX40 with an IC₅₀ of about 3 nM or lower, binds to human or murine OX40 with an IC₅₀ of about 2 nM or lower, or binds to human or murine OX40 with an IC₅₀ of about 1 nM or lower.

[1284] In some embodiments, the OX40 agonist antibody is MEDI6469 (also referred to as 9B12). MEDI6469 is a murine monoclonal antibody. Weinberg, et al., J. Immunother. 2006, 29, 575-585. In some embodiments the OX40 agonist is an antibody produced by the 9B12 hybridoma, deposited with Biovest Inc. (Malvern Mass.), as described in Weinberg, et al., J. Immunother. 2006, 29, 575-585, which is hereby incorporated by reference in its entirety. In some embodiments, the antibody comprises at least one, two, three, four, five, or six hypervariable region (HVR) or CDR sequences of antibody MEDI6469. In some embodiments, the antibody comprises a heavy chain variable region sequence and/or a light chain variable region sequence of antibody MEDI6469.

[1285] In some embodiments, the OX40 agonist is MEDI6383. MEDI6383 is an OX40 agonistic fusion protein and can be prepared as described in U.S. Pat. No. 6,312,700, the disclosure of which is incorporated by reference herein.

[1286] In some embodiments, the OX40 agonist is MEDI0562. MEDI0562 is a humanized OX40 agonist monoclonal antibody. In some embodiments, the antibody comprises at least one, two, three, four, five, or six HVR or CDR sequences of antibody MEDI0562. In some embodiments, the OX40 agonist comprises a heavy chain variable region sequence and/or a light chain variable region sequence of antibody MEDI0562.

[1287] In some embodiments, the OX40 agonist is an OX40 agonist antibody described in U.S. Pat. No. 7,550,140 and U.S. Pat. No. 8,133,983, the disclosure of which is incorporated herein by reference. In some embodiments, the OX40 agonist comprises a single-chain fragment (scFv) selected from the group consisting of SC02008, SC02009, SC02010, SC02011, SC02012, SC02012, SC02021, SC02022, and SC02023, or conservative amino acid substitutions thereof, as described in U.S. Pat. No. 7,550,140, the disclosure of which is incorporated herein by reference. In some embodiments, the OX40 agonist comprises the monoclonal antibodies 008, 011, 021 and 023, or conservative amino acid substitutions thereof, or biosimilars, antigen-binding fragments, conjugates, or variants thereof, as described in U.S. Pat. No. 7,550,140, the disclosure of which is incorporated herein by reference.

[1288] In some embodiments, the OX40 agonist comprises an IgG antibody with a heavy chain CDR3 region selected from the group consisting of SEQ ID NO:478, SEQ ID NO:479, SEQ ID NO:480, SEQ ID NO:481, SEQ ID NO:482, SEQ ID NO:483, SEQ ID NO:484, and SEQ ID NO:485. In some embodiments, the OX40 agonist comprises an IgG antibody with a heavy chain selected from the group consisting of SEQ ID NO:486, SEQ ID NO:487, SEQ ID NO:488, SEQ ID NO:489, and conservative amino acid substitutions thereof. In some embodiments, the OX40 agonist comprises an IgG antibody with a light chain selected from the group consisting of SEQ ID NO:490, SEQ ID NO:491, SEQ ID NO:492, SEQ ID NO:493, and conservative amino acid substitutions thereof. In some embodiments, the OX40 agonist comprises an IgG antibody with a heavy chain selected from the group consisting of SEQ ID NO:486, SEQ ID NO:487, SEQ ID NO:488, SEQ ID NO:489, and conservative amino acid substitutions thereof, and a light chain selected from the group consisting of SEQ ID NO:490, SEQ ID NO:491, SEQ ID NO:492, SEQ ID NO:493, and conservative amino acid substitutions thereof.

[1289] In some embodiments, the OX40 agonists of the present disclosure include the sequences provided in Table 9, which include those recited in U.S. Pat. Nos. 7,550,140 and 8,133,983, the disclosures of which are incorporated by reference herein.

TABLE 9
OX40 agonist antibody sequences.

| Identifier | Sequence (One-Letter Amino Acid Symbols) | |
|---|---|---|
| SEQ ID NO: 480 | DRYSQVHYAL DY | 12 |
| (CDR3 of scFv | | |
| SC02008) | | |
| SEQ ID NO: 481 | DRYVNTSNAF DY | 12 |
| (CDR3 of scFv | | |
| SC02009) | | |
| SEQ ID NO: 482 | DMSGFHEFDY | 10 |
| (CDR3 of scFv | | |
| SC02010) | | |
| SEQ ID NO: 483 | DRYFRQQNAF DY | 12 |
| (CDR3 of scFv | | |
| SC02011) | | |
| SEQ ID NO: 484 | ARAAGTIFDY | 10 |
| (CDR3 of scFv | | |
| SC02012) | | |
| SEQ ID NO: 485 | DRYITLPNAL DY | 12 |
| (CDR3 of scFv | | |
| SC02021) | | |
| SEQ ID NO: 486 | YDEPLTIYWF DS | 12 |
| (CDR3 of scFv | | |
| SC02022) | | |
| SEQ ID NO: 487 | YDNVMGLYWF DY | 12 |
| (CDR3 of scFv | | |
| SC02023) | | |
| SEQ ID NO: 488 | EVQLVESGGG LVQPGGSLRL SCAASGFTFS NYTMNWVRQA PGKGLEWVSA ISGSGGSTYY | 60 |
| (Amino acid | ADSVKGRFTI SRDNSKNTLY LQMNSLRAED TAVYYCAKDR YSQVHYALDY WGQGTLVTVS | 120 |
| sequence of | SASTKGPSVF PLAPSSKSTS GGTAALGCLV KDYFPEPVTV SWNSGALTSG VHTFPAVLQS | 180 |
| heavy chain of | SGLYSLSSVV TVPSSSLGTQ TYICNVNHKP SNTKVDKRVE PKSCDKTHTC PPCPAPELLG | 240 |
| 008) | GPSVFLFPPK PKDTLMISRT PEVTCVVVDV SHEDPEVKFN WYVDGVEVHN AKTKPREEQY | 300 |
| | NSTYRVVSVL TVLHQDWLNG KEYKCKVSNK ALPAPIEKTI SKAKGQPREP QVYTLPPSRE | 360 |
| | EMTKNQVSLT CLVKGFYPSD IAVEWESNGQ PENNYKTTPP VLDSDGSFFL YSKLTVDKSR | 420 |
| | WQQGNVFSCS VMHEALHNHY TQKSLSLSPG K | 451 |
| SEQ ID NO: 489 | EVQLVESGGG VVQPGRSLRL SCAASGFTFS DYTMNWVRQA PGKGLEWVSS ISGGSTYYAD | 60 |
| (Amino acid | SRKGRFTISR DNSKNTLYLQ MNNLRAEDTA VYYCARDRYF RQQNAFDYWG QGTLVTVSSA | 120 |
| sequence of | STKGPSVFPL APSSKSTSGG TAALGCLVKD YFPEPVTVSW NSGALTSGVH TFPAVLQSSG | 180 |
| heavy chain of | LYSLSSVVTV PSSSLGTQTY ICNVNHKPSN TKVDKRVEPK SCDKTHTCPP CPAPELLGGP | 240 |
| 011) | SVFLFPPKPK DTLMISRTPE VTCVVVDVSH EDPEVKFNWY VDGVEVHNAK TKPREEQYNS | 300 |
| | TYRVVSVLTV LHQDWLNGKE YKCKVSNKAL PAPIEKTISK AKGQPREPQV YTLPPSREEM | 360 |
| | TKNQVSLTCL VKGFYPSDIA VEWESNGQPE NNYKTTPPVL DSDGSFFLYS KLTVDKSRWQ | 420 |
| | QGNVFSCSVM HEALHNHYTQ KSLSLSPGK | 449 |
| SEQ ID NO: 490 | EVQLVESGGG LVQPRGSLRL SCAASGFTFS SYAMNWVRQA PGKGLEWVAV ISYDGSNKYY | 60 |
| (Amino acid | ADSVKGRFTI SRDNSKNTLY LQMNSLRAED TAVYYCAKDR YITLPNALDY WGQGTLVTVS | 120 |
| sequence of | SASTKGPSVF PLAPSSKSTS GGTAALGCLV KDYFPEPVTV SWNSGALTSG VHTFPAVLQS | 180 |
| heavy chain 021) | SGLYSLSSVV TVPSSSLGTQ TYICNVNHKP SNTKVDKRVE PKSCDKTHTC PPCPAPELLG | 240 |
| | GPSVFLFPPK PKDTLMISRT PEVTCVVVDV SHEDPEVKFN WYVDGVEVHN AKTKPREEQY | 300 |
| | NSTYRVVSVL TVLHQDWLNG KEYKCKVSNK ALPAPIEKTI SKAKGQPREP QVYTLPPSRE | 360 |
| | EMTKNQVSLT CLVKGFYPSD IAVEWESNGQ PENNYKTTPP VLDSDGSFFL YSKLTVDKSR | 420 |
| | WQQGNVFSCS VMHEALHNHY TQKSLSLSPG K | 451 |
| SEQ ID NO: 491 | EVQLVESGGG LVHPGGSLRL SCAGSGFTFS SYAMHWVRQA PGKGLEWVSA IGTGGGTYYA | 60 |
| (Amino acid | DSVMGRFTIS RDNSKNTLYL QMNSLRAEDT AVYYCARYDN VMGLYWFDYW GQGTLVTVSS | 120 |
| sequence of | ASTKGPSVFP LAPSSKSTSG GTAALGCLVK DYFPEPVTVS WNSGALTSGV HTFPAVLQSS | 180 |
| heavy chain of | GLYSLSSVVT VPSSSLGTQT YICNVNHKPS NTKVDKRVEP KSCDKTHTCP PCPAPELLGG | 240 |
| 023) | PSVFLFPPKP KDTLMISRTP EVTCVVVDVS HEDPEVKFNW YVDGVEVHNA KTKPREEQYN | 300 |
| | STYRVVSVLT VLHQDWLNGK EYKCKVSNKA LPAPIEKTIS KAKGQPREPQ VYTLPPSREE | 360 |
| | MTKNQVSLTC LVKGFYPSDI AVEWESNGQP ENNYKTTPPV LDSDGSFFLY SKLTVDKSRW | 420 |
| | QQGNVFSCSV MHEALHNHYT QKSLSLSPGK | 450 |
| SEQ ID NO: 492 | DIVMTQSPDS LPVTPGEPAS ISCRSSQSLL HSNGYNYLDW YLQKAGQSPQ LLIYLGSNRA | 60 |
| (Amino acid | SGVPDRFSGS GSGTDFTLKI SRVEAEDVGV YYCQQYYNHP TTFGQGTKLE IKRTVAAPSV | 120 |
| sequence of | FIFPPSDEQL KSGTASVVCL LNNFYPREAK VQWKVDNALQ SGNSQESVTE QDSKDSTYSL | 180 |
| light chain of | SSTLTLSKAD YEKHKVYACE VTHQGLSSPV TKSFNRGEC | 219 |
| 008) | | |
| SEQ ID NO: 493 | DIVMTQSPDS LPVTPGEPAS ISCRSSQSLL HSNGYNYLDW YLQKAGQSPQ LLIYLGSNRA | 60 |
| (Amino acid | SGVPDRFSGS GSGTDFTLKI SRVEAEDVGV YYCQQYYNHP TTFGQGTKLE IKRTVAAPSV | 120 |
| sequence of | FIFPPSDEQL KSGTASVVCL LNNFYPREAK VQWKVDNALQ SGNSQESVTE QDSKDSTYSL | 180 |
| light chain of | SSTLTLSKAD YEKHKVYACE VTHQGLSSPV TKSFNRGEC | 219 |
| 011) | | |
| SEQ ID NO: 494 | DIQMTQSPVS LPVTPGEPAS ISCRSSQSLL HSNGYNYLDW YLQKPGQSPQ LLIYLGSNRA | 60 |
| (Amino acid | SGVPDRFSGS GSGTDFTLKI SRVEAEDVGV YYCQQYKSNP PTFGQGTKVE IKRTVAAPSV | 120 |
| sequence of | FIFPPSDEQL KSGTASVVCL LNNFYPREAK VQWKVDNALQ SGNSQESVTE QDSKDSTYSL | 180 |
| light chain of | SSTLTLSKAD YEKHKVYACE VTHQGLSSPV TKSFNRGEC | 219 |
| 021) | | |
| SEQ ID NO: 495 | EIVLTQSPAT LSLSPGERAT LSCRASQSVS SYLAWYQQKP GQAPRLLIYD ASNRATGIPA | 60 |
| (Amino acid | RFSGSGSGTD FTLTISSLEP EDFAVYYCQQ RSNWPPAFGG GTKVEIKRTV AAPSVFIFPP | 120 |
| sequence of | SDEQLKSGTA SVVCLLNNFY PREAKVQWKV DNALQSGNSQ ESVTEQDSKD STYSLSSTLT | 180 |
| light chain of | LSKADYEKHK VYACEVTHQG LSSPVTKSFN RGEC | 214 |
| 023) | | |

[1290] In an embodiment, the OX40 agonist is the monoclonal antibody 11D4 or 18D8, the amino acid sequences of which are set forth in Table 10, or biosimilars, antigen-binding fragments, conjugates, or variants thereof, as described in U.S. Pat. Nos. 7,960,515; 8,236,930; and 9,028,824; the disclosures of which are incorporated herein by reference. In some embodiments, the OX40 agonist is a human OX40 agonist antibody described in U.S. Pat. Nos. 7,960,515; 8,236,930; and 9,028,824; the disclosures of which are incorporated herein by reference. In an embodiment, a OX40 agonist comprises heavy and light chains having the sequences shown in SEQ ID NO:502 and SEQ ID NO:503, or in SEQ ID NO:512 and SEQ ID NO:513, respectively, or conservative amino acid substitutions thereof, or antigen binding fragments, Fab fragments, single-chain variable fragments (scFv), variants, or conjugates thereof.

[1291] In an embodiment, a OX40 agonist comprises heavy and light chains that are each at least 99% identical to the sequences shown in SEQ ID NO:502 and SEQ ID NO:503, respectively. In an embodiment, a OX40 agonist comprises heavy and light chains that are each at least 98% identical to the sequences shown in SEQ ID NO:502 and SEQ ID NO:503, respectively. In an embodiment, a OX40 agonist comprises heavy and light chains that are each at least 97% identical to the sequences shown in SEQ ID NO:502 and SEQ ID NO:503, respectively. In an embodiment, a OX40 agonist comprises heavy and light chains that are each at least 96% identical to the sequences shown in SEQ ID NO:502 and SEQ ID NO:503, respectively. In an embodiment, a OX40 agonist comprises heavy and light chains that are each at least 95% identical to the sequences shown in SEQ ID NO:502 and SEQ ID NO:503, respectively.

[1292] In an embodiment, the OX40 agonist is an OX40 agonist biosimilar monoclonal antibody approved by drug regulatory authorities with reference to 11 D4 or 18D8. In an embodiment, the biosimilar monoclonal antibody comprises an OX40 antibody comprising an amino acid sequence which has at least 97% sequence identity, e.g., 97%, 98%, 99% or 100% sequence identity, to the amino acid sequence of a reference medicinal product or reference biological product and which comprises one or more post-translational modifications as compared to the reference medicinal product or reference biological product, wherein the reference medicinal product or reference biological product is 11D4 or 18D8. In some embodiments, the one or more post-translational modifications are selected from one or more of: glycosylation, oxidation, deamidation, and truncation. In some embodiments, the biosimilar is a OX40 agonist authorized or submitted for authorization, wherein the OX40 agonist antibody is provided in a formulation which differs from the formulations of a reference medicinal product or reference biological product, wherein the reference medicinal product or reference biological product is 11D4 or 18D8. The OX40 agonist may be authorized by a drug regulatory authority such as the U.S. FDA and/or the European Union's EMA. In some embodiments, the biosimilar is provided as a composition which further comprises one or more excipients, wherein the one or more excipients are the same or different to the excipients comprised in a reference medicinal product or reference biological product, wherein the reference medicinal product or reference biological product is 11D4 or 18D8. In some embodiments, the biosimilar is provided as a composition which further comprises one or more excipients, wherein the one or more excipients are the same or different to the excipients comprised in a reference medicinal product or reference biological product, wherein the reference medicinal product or reference biological product is 11D4 or 18D8.

[1293] In an embodiment, the OX40 agonist comprises the heavy and light chain CDRs or variable regions (VRs) of 11D4 or 18D8. In an embodiment, the OX40 agonist heavy chain variable region (V_{H}) comprises the sequence shown in SEQ ID NO:500 or SEQ ID NO:510, or conservative amino acid substitutions thereof, and the OX40 agonist light chain variable region (V_{L}) comprises the sequence shown in SEQ ID NO:501 or SEQ ID NO:511, or conservative amino acid substitutions thereof. In an embodiment, a OX40 agonist comprises V_{H} and V_{L} regions that are each at least 99% identical to the sequences shown in SEQ ID NO:500 and SEQ ID NO:510, respectively. In an embodiment, a OX40 agonist comprises V_{H} and V_{L} regions that are each at least 98% identical to the sequences shown in SEQ ID NO:500 and SEQ ID NO:510, respectively. In an embodiment, a OX40 agonist comprises V_{H} and V_{L} regions that are each at least 97% identical to the sequences shown in SEQ ID NO:500 and SEQ ID NO:510, respectively. In an embodiment, a OX40 agonist comprises V_{H} and V_{L} regions that are each at least 96% identical to the sequences shown in SEQ ID NO:500 and SEQ ID NO:510, respectively. In an embodiment, a OX40 agonist comprises V_{H} and V_{L} regions that are each at least 95% identical to the sequences shown in SEQ ID NO:500 and SEQ ID NO:510, respectively. In an embodiment, a OX40 agonist comprises V_{H} and V_{L} regions that are each at least 99% identical to the sequences shown in SEQ ID NO:501 and SEQ ID NO:511, respectively. In an embodiment, a OX40 agonist comprises V_{H} and V_{L} regions that are each at least 98% identical to the sequences shown in SEQ ID NO:501 and SEQ ID NO:511, respectively. In an embodiment, a OX40 agonist comprises V_{H} and V_{L} regions that are each at least 97% identical to the sequences shown in SEQ ID NO:501 and SEQ ID NO:511, respectively. In an embodiment, a OX40 agonist comprises V_{H} and V_{L} regions that are each at least 96% identical to the sequences shown in SEQ ID NO:501 and SEQ ID NO:511, respectively. In an embodiment, a OX40 agonist comprises V_{H} and V_{L} regions that are each at least 95% identical to the sequences shown in SEQ ID NO:501 and SEQ ID NO:511, respectively.

[1294] In an embodiment, a OX40 agonist comprises heavy chain CDR1, CDR2 and CDR3 domains having the sequences set forth in SEQ ID NO:494, SEQ ID NO:495, and SEQ ID NO:496, respectively, and conservative amino acid substitutions thereof, and light chain CDR1, CDR2 and CDR3 domains having the sequences set forth in SEQ ID NO:497, SEQ ID NO:498, and SEQ ID NO:499, respectively, and conservative amino acid substitutions thereof.

[1295] In some embodiments, the OX40 agonists of the present disclosure include antibodies with one or more of the sequences provided below in Table 10, which include those recited in U.S. Pat. Nos. 7,960,515; 8,236,930; and 9,028,824, the disclosures of which are incorporated by reference herein.

TABLE 10
OX40 agonist antibody sequences.

| Identifier | Sequence (One-Letter Amino Acid Symbols) | |
|---|---|---|
| SEQ ID NO: 496 | SYSMN | 5 |
| (heavy chain | | |
| CDR1 of human | | |
| antibody 11D4) | | |
| SEQ ID NO: 497 | YISSSSSTID YADSVKG | 17 |
| (heavy chain | | |
| CDR2 of human | | |
| antibody 11D4) | | |
| SEQ ID NO: 498 | ESGWYLFDY | 9 |
| (heavy chain | | |
| CDR3 of human | | |
| antibody 11D4) | | |
| SEQ ID NO: 499 | RASQGISSWL A | 11 |
| (light chain | | |
| CDR1 of human | | |
| antibody 11D4) | | |
| SEQ ID NO: 500 | AASSLQS | 7 |
| (light chain | | |
| CDR2 of human | | |
| antibody 11D4) | | |
| SEQ ID NO: 501 | QQYNSYPPT | 9 |
| (light chain | | |
| CDR3 of human | | |
| antibody 11D4) | | |
| SEQ ID NO: 502 | EVQLVESGGG LVQPGGSLRL SCAASGFTFS SYSMNWVRQA PGKGLEWVSY ISSSSSTIDY | 60 |
| (variable region | ADSVKGRFTI SRDNAKNSLY LQMNSLRDED TAVYYCARES GWYLFDYWGQ GTLVTVSS | 118 |
| of heavy chain | | |
| of human | | |
| antibody 11D4) | | |
| SEQ ID NO: 503 | DIQMTQSPSS LSASVGDRVT ITCRASQGIS SWLAWYQQKP EKAPKSLIYA ASSLQSGVPS | 60 |
| (variable region | RFSGSGSGTD FTLTISSLQP EDFATYYCQQ YNSYPPTFGG GTKVEIK | 107 |
| of light chain | | |
| of human | | |
| antibody 11D4) | | |
| SEQ ID NO: 504 | EVQLVESGGG LVQPGGSLRL SCAASGFTFS SYSMNWVRQA PGKGLEWVSY ISSSSSTIDY | 60 |
| (heavy chain of | ADSVKGRFTI SRDNAKNSLY LQMNSLRDED TAVYYCARES GWYLFDYWGQ GTLVTVSSAS | 120 |
| human antibody | TKGPSVFPLA PCSRSTSEST AALGCLVKDY FPEPVTVSWN SGALTSGVHT FPAVLQSSGL | 180 |
| 11D4) | YSLSSVVTVP SSNFGTQTYT CNVDHKPSNT KVDKTVERKC CVECPPCPAP PVAGPSVFLF | 240 |
| | PPKPKDTLMI SRTPEVTCVV VDVSHEDPEV QFNWYVDGVE VHNAKTKPRE EQFNSTFRVV | 300 |
| | SVLTVVHQDW LNGKEYKCKV SNKGLPAPIE KTISKTKGQP REPQVYTLPP SREEMTKNQV | 360 |
| | SLTCLVKGFY PSDIAVEWES NGQPENNYKT TPPMLDSDGS FFLYSKLTVD KSRWQQGNVF | 420 |
| | SCSVMHEALH NHYTQKSLSL SPGK | 444 |
| SEQ ID NO: 505 | DIQMTQSPSS LSASVGDRVT ITCRASQGIS SWLAWYQQKP EKAPKSLIYA ASSLQSGVPS | 60 |
| (light chain of | RFSGSGSGTD FTLTISSLQP EDFATYYCQQ YNSYPPTFGG GTKVEIKRTV AAPSVFIFPP | 120 |
| human antibody | SDEQLKSGTA SVVCLLNNFY PREAKVQWKV DNALQSGNSQ ESVTEQDSKD STYSLSSTLT | 180 |
| 11D4) | LSKADYEKHK VYACEVTHQG LSSPVTKSFN RGEC | 214 |
| SEQ ID NO: 506 | DYAMH | 5 |
| (heavy chain | | |
| CDR1 of human | | |
| antibody 18D8) | | |
| SEQ ID NO: 507 | GISWNSGSIG YADSVKG | 17 |
| (heavy chain | | |
| CDR2 of human | | |
| antibody 18D8) | | |
| SEQ ID NO: 508 | DQSTADYYFY YGMDV | 15 |
| (heavy chain | | |
| CDR3 of human | | |
| antibody 18D8) | | |
| SEQ ID NO: 509 | RASQSVSSYL A | 11 |
| (light chain | | |
| CDR1 of human | | |
| antibody 18D8) | | |
| SEQ ID NO: 510 | DASNRAT | 7 |
| (light chain | | |
| CDR2 of human | | |
| antibody 18D8) | | |
| SEQ ID NO: 511 | QQRSNWPT | 8 |
| (light chain | | |
| CDR3 of human | | |
| antibody 18D8) | | |
| SEQ ID NO: 512 | EVQLVESGGG LVQPGRSLRL SCAASGFTFD DYAMHWVRQA PGKGLEWVSG ISWNSGSIGY | 60 |
| (variable region | ADSVKGRFTI SRDNAKNSLY LQMNSLRAED TALYYCAKDQ STADYYFYYG MDVWGQGTTV | 120 |
| of heavy chain | TVSS | 124 |
| of human | | |
| antibody 18D8) | | |
| SEQ ID NO: 513 | EIVVTQSPAT LSLSPGERAT LSCRASQSVS SYLAWYQQKP GQAPRLLIYD ASNRATGIPA | 60 |
| (variable region | RFSGSGSGTD FTLTISSLEP EDFAVYYCQQ RSNWPTFGQG TKVEIK | 106 |
| of light chain | | |
| of human | | |
| antibody 18D8) | | |
| SEQ ID NO: 514 | EVQLVESGGG LVQPGRSLRL SCAASGFTFD DYAMHWVRQA PGKGLEWVSG ISWNSGSIGY | 60 |
| (heavy chain of | ADSVKGRFTI SRDNAKNSLY LQMNSLRAED TALYYCAKDQ STADYYFYYG MDVWGQGTTV | 120 |
| human antibody | TVSSASTKGP SVFPLAPCSR STSESTAALG CLVKDYFPEP VTVSWNSGAL TSGVHTFPAV | 180 |
| 18D8) | LQSSGLYSLS SVVTVPSSNF GTQTYTCNVD HKPSNTKVDK TVERKCCVEC PPCPAPPVAG | 240 |
| | PSVFLFPPKP KDTLMISRTP EVTCVVVDVS HEDPEVQFNW YVDGVEVHNA KTKPREEQFN | 300 |
| | STFRVVSVLT VVHQDWLNGK EYKCKVSNKG LPAPIEKTIS KTKGQPREPQ VYTLPPSREE | 360 |
| | MTKNQVSLTC LVKGFYPSDI AVEWESNGQP ENNYKTTPPM LDSDGSFFLY SKLTVDKSRW | 420 |
| | QQGNVFSCSV MHEALHNHYT QKSLSLSPGK | 450 |
| SEQ ID NO: 515 | EIVVTQSPAT LSLSPGERAT LSCRASQSVS SYLAWYQQKP GQAPRLLIYD ASNRATGIPA | 60 |
| (light chain of | RFSGSGSGTD FTLTISSLEP EDFAVYYCQQ RSNWPTFGQG TKVEIKRTVA APSVFIFPPS | 120 |
| human antibody | DEQLKSGTAS VVCLLNNFYP REAKVQWKVD NALQSGNSQE SVTEQDSKDS TYSLSSTLTL | 180 |
| 18D8) | SKADYEKHKV YACEVTHQGL SSPVTKSFNR GEC | 213 |

[1296] In some embodiments, the OX40 agonists of the present disclosure include antibodies with the sequences provided below in Table 10, which include those recited in the antibodies disclosed in International Patent Publication No. WO 2012/027328 and U.S. Pat. Nos. 9,006,399 and 9,163,085, the disclosures of which are each incorporated herein by reference.

[1297] In some embodiments, the OX40 agonist comprises a heavy chain variable region selected from the group consisting of SEQ ID NO: 517, SEQ ID NO:518, SEQ ID NO: 527, SEQ ID NO:528, and conservative amino acid substitutions thereof. In some embodiments, the OX40 agonist comprises a light chain variable region selected from the group consisting of SEQ ID NO:522, SEQ ID NO:523, SEQ ID NO:532, SEQ ID NO:533, and conservative amino acid substitutions thereof. In some embodiments, the OX40 agonist antibody comprises a heavy chain variable region selected from the group consisting of SEQ ID NO:517, SEQ ID NO:518, SEQ ID NO:527, SEQ ID NO:528, and conservative amino acid substitutions thereof, and a light chain variable region selected from the group consisting of SEQ ID NO: 522, SEQ ID NO: 523, SEQ ID NO:532, SEQ ID NO:533, and conservative amino acid substitutions thereof. In some embodiments, the OX40 agonist comprises a heavy chain variable region comprising SEQ ID NO:517, and conservative amino acid substitutions thereof, and a light chain variable region comprising SEQ ID NO:522, and conservative amino acid substitutions thereof. In some embodiments, the OX40 agonist comprises a heavy chain variable region comprising SEQ ID NO:517, and conservative amino acid substitutions thereof, and a light chain variable region comprising SEQ ID NO:532, and conservative amino acid substitutions thereof. In some embodiments, the OX40 agonist comprises a heavy chain variable region comprising SEQ ID NO:517, and conservative amino acid substitutions thereof, and a light chain variable region comprising SEQ ID NO:522, and conservative amino acid substitutions thereof. In some embodiments, the OX40 agonist comprises a heavy chain variable region comprising SEQ ID NO:517, and conservative amino acid substitutions thereof, and a light chain variable region comprising SEQ ID NO:532, and conservative amino acid substitutions thereof.

[1298] In some embodiments, the OX40 agonist comprises a heavy chain CDR1 selected from the group consisting of SEQ ID NO:514 or SEQ ID NO:524, a heavy chain CDR2 comprising SEQ ID NO:515 or SEQ ID NO:525, a heavy chain CDR3 comprising SEQ ID NO:516 or SEQ ID NO:526, a light chain CDR1 comprising SEQ ID NO:519 or SEQ ID NO:529, a light chain CDR2 comprising SEQ ID NO:520 or SEQ ID NO:530, and a light chain CDR3 comprising SEQ ID NO:521 or SEQ ID NO:531.

[1299] In some embodiments, the antibody comprises one, two, three, four, five, or six HVR or CDR sequences of antibody Hu119-122 as described in U.S. Pat. Nos. 9,006,399 and 9,163,085, the disclosures of which are each incorporated herein by reference. In some embodiments, the antibody comprises a heavy chain variable region sequence and/or a light chain variable region sequence of antibody Hu119-122 as described in U.S. Pat. Nos. 9,006,399 and 9,163,085, the disclosures of which are each incorporated herein by reference.

[1300] In some embodiments, the OX40 agonists of the present disclosure include antibodies with one or more of the sequences provided below in Table 11, which include those recited in U.S. Pat. Nos. 9,006,399 and 9,163,085, the disclosures of which are incorporated by reference herein.

TABLE 11
OX40 agonistic antibodies.

| Identifier | Sequence (One-Letter Amino Acid Symbols) | |
|---|---|---|
| SEQ ID NO: 516 | DYSMH | 5 |
| (heavy chain CDR1 | | |
| of humanized | | |
| antibody) | | |
| SEQ ID NO: 517 | WINTETGEPT YADDFKG | 17 |
| (heavy chain CDR2 | | |
| of humanized | | |
| antibody) | | |
| SEQ ID NO: 518 | PYYDYVSYYA MDY | 13 |
| (heavy chain CDR3 | | |
| of humanized | | |
| antibody) | | |
| SEQ ID NO: 519 | QIQLVQSGPE LKKPGETVKI SCKASGYTFT DYSMHWVKQA PGKGLKWMGW INTETGEPTY | 60 |
| (heavy chain | ADDFKGRFAF SLETSASTAY LQINNLKNED TATYFCANPY YDYVSYYAMD YWGHGTSVTV | 120 |
| variable region | SS | 122 |
| of humanized | | |
| antibody) | | |
| SEQ ID NO: 520 | QVQLVQSGSE LKKPGASVKV SCKASGYTFT DYSMHWVRQA PGQGLKWMGW INTETGEPTY | 60 |
| (heavy chain | ADDFKGRFVF SLDTSVSTAY LQISSLKAED TAVYYCANPY YDYVSYYAMD YWGQGTTVTV | 120 |
| variable region | SS | 122 |
| of humanized | | |
| antibody) | | |
| SEQ ID NO: 521 | KASQDVSTAV A | 11 |
| (light chain CDR1 | | |
| of humanized | | |
| antibody) | | |
| SEQ ID NO: 522 | SASYLYT | 7 |
| (light chain CDR2 | | |
| of humanized | | |
| antibody) | | |
| SEQ ID NO: 523 | QQHYSTPRT | 9 |
| (light chain CDR3 | | |
| of humanized | | |
| antibody) | | |
| SEQ ID NO: 524 | DIVMTQSHKF MSTSVRDRVS ITCKASQDVS TAVAWYQQKP GQSPKLLIYS ASYLYTGVPD | 60 |
| (light chain | RFTGSGSGTD FTFTISSVQA EDLAVYYCQQ HYSTPRTFGG GTKLEIK | 107 |
| variable region | | |
| of humanized | | |
| antibody) | | |
| SEQ ID NO: 525 | DIQMTQSPSS LSASVGDRVT ITCKASQDVS TAVAWYQQKP GKAPKLLIYS ASYLYTGVPS | 60 |
| (light chain | RFSGSGSGTD FTFTISSLQP EDIATYYCQQ HYSTPRTFGQ GTKLEIK | 107 |
| variable region | | |
| of humanized | | |
| antibody) | | |
| SEQ ID NO: 526 | SHDMS | 5 |
| (heavy chain CDR1 | | |
| of humanized | | |
| antibody) | | |
| SEQ ID NO: 527 | AINSDGGSTY YPDTMER | 17 |
| (heavy chain CDR2 | | |
| of humanized | | |
| antibody) | | |
| SEQ ID NO: 528 | HYDDYYAWFA Y | 11 |
| (heavy chain CDR3 | | |
| of humanized | | |
| antibody) | | |
| SEQ ID NO: 529 | EVQLVESGGG LVQPGESLKL SCESNEYEFP SHDMSWVRKT PEKRLELVAA INSDGGSTYY | 60 |
| (heavy chain | PDTMERRFII SRDNTKKTLY LQMSSLRSED TALYYCARHY DDYYAWFAYW GQGTLVTVSA | 120 |
| variable region | | |
| of humanized | | |
| antibody) | | |
| SEQ ID NO: 530 | EVQLVESGGG LVQPGGSLRL SCAASEYEFP SHDMSWVRQA PGKGLELVAA INSDGGSTYY | 60 |
| (heavy chain | PDTMERRFTI SRDNAKNSLY LQMNSLRAED TAVYYCARHY DDYYAWFAYW GQGTMVTVSS | 120 |
| variable region | | |
| of humanized | | |
| antibody) | | |
| SEQ ID NO: 531 | RASKSVSTSG YSYMH | 15 |
| (light chain CDR1 | | |
| of humanized | | |
| antibody) | | |
| SEQ ID NO: 532 | LASNLES | 7 |
| (light chain CDR2 | | |
| of humanized | | |
| antibody) | | |
| SEQ ID NO: 533 | QHSRELPLT | 9 |
| (light chain CDR3 | | |
| of humanized | | |
| antibody) | | |
| SEQ ID NO: 534 | DIVLTQSPAS LAVSLGQRAT ISCRASKSVS TSGYSYMHWY QQKPGQPPKL LIYLASNLES | 60 |
| (light chain | GVPARFSGSG SGTDFTLNIH PVEEEDAATY YCQHSRELPL TFGAGTKLEL K | 111 |
| variable region | | |
| of humanized | | |
| antibody) | | |
| SEQ ID NO: 535 | EIVLTQSPAT LSLSPGERAT LSCRASKSVS TSGYSYMHWY QQKPGQAPRL LIYLASNLES | 60 |
| (light chain | GVPARFSGSG SGTDFTLTIS SLEPEDFAVY YCQHSRELPL TFGGGTKVEI K | 111 |
| variable region | | |
| of humanized | | |
| antibody) | | |

[1301] In some embodiments, the OX40 agonist is an anti-human OX40 agonist antibody described in International Patent Application Publication No. WO 2013/028231, the disclosure of which is incorporated herein by reference in its entirety.

[1302] In some embodiments, an OX40 agonist comprises a heavy chain comprising SEQ ID NO:534, or conservative amino acid substitutions thereof. In some embodiments an OX40 agonist comprises a light chain comprising SEQ ID NO:535, or conservative amino acid substitutions thereof. In some embodiments, an OX40 agonist comprises a heavy chain comprising SEQ ID NO:534, or conservative amino acid substitutions thereof, and a light chain comprising SEQ ID NO:535, or conservative amino acid substitutions thereof.

[1303] In some embodiments, an OX40 agonist comprises a heavy chain variable region comprising SEQ ID NO:536, or conservative amino acid substitutions thereof. In some embodiments an OX40 agonist comprises a light chain variable region comprising SEQ ID NO:537, or conservative amino acid substitutions thereof. In some embodiments, an OX40 agonist antibody comprises a heavy chain variable region comprising SEQ ID NO:536, or conservative amino acid substitutions thereof, and a light chain variable region comprising SEQ ID NO:537, or conservative amino acid substitutions thereof.

[1304] In some embodiments, the antibody comprises at least one, two, three, four, five, or six HVR or CDR sequences of antibody Mab CH 119-43-1 as described in International Patent Application Publication No. WO 2013/028231. In some embodiments, the antibody comprises a heavy chain variable region sequence and/or a light chain variable region sequence of antibody Mab CH 119-43-1 as described in International Patent Application Publication No. WO 2013/028231.

[1305] In some embodiments, the OX40 agonists of the present disclosure include antibodies with the sequences provided below in Table 12, which include those disclosed in International Patent Application Publication No. WO 2013/028231.

TABLE 12
OX40 agonistic antibodies.

| Identifier | Sequence (One-Letter Amino Acid Symbols) | |
|---|---|---|
| SEQ ID NO: 536 | MYLGLNYVFI VFLLNGVQSE VKLEESGGGL VQPGGSMKLS CAASGFTFSD AWMDWVRQSP | 60 |
| (heavy chain) | EKGLEWVAEI RSKANNHATY YAESVNGRFT ISRDDSKSSV YLQMNSLRAE DTGIYYCTWG | 120 |
| | EVFYFDYWGQ GTTLTVSSAS TKGPSVFPLA PSSKSTSGGT AALGCLVKDY FPEPVTVSWN | 180 |
| | SGALTSGVHT FPAVLQSSGL YSLSSVVTVP SSSLGTQTYI TCNVNHKPSN TKVDKKVEPK | 240 |
| | SCDKTHTCPP CPAPELLGGP SVFLFPPKPK DTLMISRTPE VTCVVVDVSH EDPEVKFNWY | 300 |
| | VDGVEVHNAK TKPREEQYNS TYRVVSVLTV LHQDWLNGKE YKCKVSNKAL PAPIEKTISK | 360 |
| | AKGQPREPQV YTLPPSRDEL TKNQVSLTCL VKGFYPSDIA VEWESNGQPE NNYKTTPPVL | 420 |
| | DSDGSFFLYS KLTVDKSRWQ QGNVFSCSVM HEALHNHYTQ KSLSLSPGK | 469 |
| SEQ ID NO: 537 | MRPSIQFLGL LLFWLHGAQC DIQMTQSPSS LSASLGGKVT ITCKSSQDIN KYIAWYQHKP | 60 |
| (light chain) | GKGPRLLIHY TSTLQPGIPS RFSGSGSGRD YSFSISNLEP EDIATYYCLQ YDNLLTFGAG | 120 |
| | TKLELKRTVA APSVFIFPPS DEQLKSGTAS VVCLLNNFYP REAKVQWKVD NALQSGNSQE | 180 |
| | SVTEQDSKDS TYSLSSTLTL SKADYEKHKV YACEVTHQGL SSPVTKSFNR GEC | 233 |
| SEQ ID NO: 538 | MYLGLNYVFI VFLLNGVQSE VKLEESGGGL VQPGGSMKLS CAASGFTFSD AWMDWVRQSP | 60 |
| (heavy chain | EKGLEWVAEI RSKANNHATY YAESVNGRFT ISRDDSKSSV YLQMNSLRAE DTGIYYCTWG | 120 |
| variable region) | EVFYFDYWGQ GTTLTVSS | 138 |
| SEQ ID NO: 539 | MRPSIQFLGL LLFWLHGAQC DIQMTQSPSS LSASLGGKVT ITCKSSQDIN KYIAWYQHKP | 60 |
| (light chain | GKGPRLLIHY TSTLQPGIPS RFSGSGSGRD YSFSISNLEP EDIATYYCLQ YDNLLTFGAG | 120 |
| variable region) | TKLELK | 126 |

[1306] In some embodiments, the OX40 agonist antibody is an OX40 agonist antibody described in International Patent Application Publication No. WO 2013/038191 and U.S. Patent Application Publication No. 2015/0132288, the disclosures of each of which are incorporated herein by reference.

[1307] In some embodiments, the OX40 agonist comprises a heavy chain variable region comprising SEQ ID NO:538 or SEQ ID NO:546, or conservative amino acid substitutions thereof. In some embodiments, the OX40 agonist comprises a light chain variable region comprising SEQ ID NO:539 or SEQ ID NO:547, or conservative amino acid substitutions thereof.

[1308] In some embodiments, the OX40 agonist comprises a heavy chain variable region comprising SEQ ID NO:538 or SEQ ID NO:546, or conservative amino acid substitutions thereof, and a light chain variable region comprising SEQ ID NO:539 or SEQ ID NO:547, or conservative amino acid substitutions thereof. In some embodiments, the OX40 agonist comprises a heavy chain variable region comprising SEQ ID NO:538, or conservative amino acid substitutions thereof, and a light chain variable region comprising SEQ ID NO:539, or conservative amino acid substitutions thereof. In some embodiments, the OX40 agonist comprises a heavy chain variable region comprising SEQ ID NO:546, or conservative amino acid substitutions thereof, and a light chain variable region comprising SEQ ID NO:547, or conservative amino acid substitutions thereof. In some embodiments, the OX40 agonist comprises a heavy chain variable region comprising SEQ ID NO:538, or conservative amino acid substitutions thereof, and a light chain variable region comprising SEQ ID NO:547, or conservative amino acid substitutions thereof. In some embodiments, the OX40 agonist comprises a heavy chain variable region comprising SEQ ID NO:539, or conservative amino acid substitutions thereof, and a light chain variable region comprising SEQ ID NO:546, or conservative amino acid substitutions thereof.

[1309] In some embodiments, the OX40 agonist antibody comprises a heavy chain CDR1 comprising SEQ ID NO:540 or SEQ ID NO:548, a heavy chain CDR2 comprising SEQ ID NO:541 or SEQ ID NO:549, a heavy chain CDR3 comprising SEQ ID NO:542 or SEQ ID NO:550, a light chain CDR1 comprising SEQ ID NO:543 or SEQ ID NO:551, a light chain CDR2 comprising SEQ ID NO:544 or SEQ ID NO:552, and a light chain CDR3 comprising SEQ ID NO:545 or SEQ ID NO:553.

[1310] In some embodiments, the antibody comprises at least one, two, three, four, five, or six HVR or CDR sequences of antibody clone 20E5 as described in WO 2013/038191. In some embodiments, the antibody comprises a heavy chain variable region sequence and/or a light chain variable region sequence of antibody clone 20E5 as described in WO 2013/038191.

[1311] In some embodiments, the antibody comprises at least one, two, three, four, five, or six HVR or CDR sequences of antibody clone 12H3 as described in WO 2013/038191. In some embodiments, the antibody comprises a heavy chain variable region sequence and/or a light chain variable region sequence of antibody clone 12H3 as described in WO 2013/038191.

[1312] In some embodiments, the OX40 agonists of the present disclosure include antibodies with the sequences provided in Table 13, which include those disclosed in International Patent Application Publication No. WO 2013/038191 and U.S. Patent Application Publication No. 2015/0132288.

TABLE 13
OX40 agonistic antibodies.

| Identifier | Sequence (One-Letter Amino Acid Symbols) | |
|---|---|---|
| SEQ ID NO: 540 | EVQLQQSGPE LVKPGASVKM SCKASGYTFT SYVMHWVKQK PGQGLEWIGY INPYNDGTKY | 60 |
| (heavy chain | NEKFKGKATL TSDKSSSTAY MELSSLTSED SAVYYCANYY GSSLSMDYWG QGTSVTVSS | 119 |
| variable region) | | |
| SEQ ID NO: 541 | DIQMTQTTSS LSASLGDRVT ISCRASQDIS NYLNWYQQKP DGTVKLLIYY TSRLHSGVPS | 60 |
| (light chain | RFSGSGSGTD YSLTISNLEQ EDIATYFCQQ GNTLPWTFGG GTKLEIKR | 108 |
| variable region) | | |
| SEQ ID NO: 542 | GYTFTSYVMH | 10 |
| (heavy chain | | |
| CDR1) | | |
| SEQ ID NO: 543 | YINPYNDGTK YNEKFKG | 17 |
| (heavy chain | | |
| CDR2) | | |
| SEQ ID NO: 544 | YYGSSLSMDY | 10 |
| (heavy chain | | |
| CDR3) | | |
| SEQ ID NO: 545 | RASQDISNYL N | 11 |
| (light chain | | |
| CDR1) | | |
| SEQ ID NO: 546 | YTSRLHS | 7 |
| (light chain | | |
| CDR2) | | |
| SEQ ID NO: 547 | QQGNTLPWT | 9 |
| (light chain | | |
| CDR3) | | |
| SEQ ID NO: 548 | EVQLQQSGPE LVKPGASVKI SCKTSGYTFK DYTMHWVKQS HGKSLEWIGG IYPNNGGSTY | 60 |
| (heavy chain | NQNFKDKATL TVDKSSSTAY MEFRSLTSED SAVYYCARMG YHGPHLDFDV WGAGTTVTVS | 120 |
| variable region) | P | 121 |
| SEQ ID NO: 549 | DIVMTQSHKF MSTSLGDRVS ITCKASQDVG AAVAWYQQKP GQSPKLLIYW ASTRHTGVPD | 60 |
| (light chain | RFTGGGSGTD FTLTISNVQS EDLTDYFCQQ YINYPLTFGG GTKLEIKR | 108 |
| variable region) | | |
| SEQ ID NO: 550 | GYTFKDYTMH | 10 |
| (heavy chain | | |
| CDR1) | | |
| SEQ ID NO: 551 | GIYPNNGGST YNQNFKD | 17 |
| (heavy chain | | |
| CDR2) | | |
| SEQ ID NO: 552 | MGYHGPHLDF DV | 12 |
| (heavy chain | | |
| CDR3) | | |
| SEQ ID NO: 553 | KASQDVGAAV A | 11 |
| (light chain | | |
| CDR1) | | |
| SEQ ID NO: 554 | WASTRHT | 7 |
| (light chain | | |
| CDR2) | | |
| SEQ ID NO: 555 | QQYINYPLT | 9 |
| (light chain | | |
| CDR3) | | |

[1313] In some embodiments, the OX40 agonist is an OX40 agonist antibody described in International Patent Application Publication No. WO 2014/148895 and U.S. Patent Application Publication No. US 2014/377284, each of which is incorporated herein by reference.

[1314] In some embodiments, the OX40 agonist comprises a heavy chain variable region selected from the group consisting of SEQ ID NO:554, SEQ ID NO:557, SEQ ID NO:558, SEQ ID NO:559, SEQ ID NO:562, SEQ ID NO:563, and conservative amino acid substitutions thereof. In some embodiments, the OX40 agonist comprises a light chain variable region selected from the group consisting of SEQ ID NO: 555, SEQ ID NO:556, SEQ ID NO: 560, SEQ ID NO:561, and conservative amino acid substitutions thereof. In some embodiments, the OX40 agonist comprises a heavy chain variable region selected from the group consisting of SEQ ID NO:554, SEQ ID NO:557, SEQ ID NO:558, SEQ ID NO:559, SEQ ID NO:562, SEQ ID NO:563, and conservative amino acid substitutions thereof, and a light chain variable region selected from the group consisting of SEQ ID NO: 555, SEQ ID NO:556, SEQ ID NO: 560, SEQ ID NO:561 and conservative amino acid substitutions thereof.

[1315] In some embodiments, the antibody comprises at least one, two, three, four, five, or six HVR or CDR sequences of antibody clone 20E5 as described in International Patent Application Publication No. WO 2014/148895 and U.S. Patent Application Publication No. US 2014/377284, the disclosures of which are incorporated herein by reference. In some embodiments, the antibody comprises a heavy chain variable region sequence and/or a light chain variable region sequence of antibody clone 20E5 as described in International Patent Application Publication No. WO 2014/148895 and U.S. Patent Application Publication No. US 2014/377284, the disclosures of which are incorporated herein by reference.

[1316] In some embodiments, the antibody comprises at least one, two, three, four, five, or six HVR or CDR sequences of antibody clone 12H3 as described in International Patent Application Publication No. WO 2014/148895 and U.S. Patent Application Publication No. US 2014/377284, the disclosures of which are incorporated herein by reference. In some embodiments, the antibody comprises a heavy chain variable region sequence and/or a light chain variable region sequence of antibody clone 12H3 as described in International Patent Application Publication No. WO 2014/148895 and U.S. Patent Application Publication No. US 2014/377284, the disclosures of which are incorporated herein by reference.

[1317] In some embodiments, the OX40 agonists of the present disclosure include antibodies with the sequences provided below in Table 14, which include those recited in the antibodies disclosed in International Patent Publication No. WO 2014/148895 A1 and U.S. Patent Application Publication No. US 2014/377284.

TABLE 14
OX40 agonistic antibodies from WO 2014/148895A1 and U.S. Patent Application
Publication No. US 2014/377284.

| Identifier | Sequence (One-Letter Amino Acid Symbols) | |
|---|---|---|
| SEQ ID NO: 556 | QVQLVQSGAE VKKPGASVKV SCKASGYTFT SYVMHWVRQA PGQRLEWMGY INPYNDGTKY | 60 |
| (heavy chain | NEKFKGRVTI TSDTSASTAY MELSSLRSED TAVYYCANYY GSSLSMDYWG QGTLVTVSS | 119 |
| variable region) | | |
| SEQ ID NO: 557 | DIQMTQSPSS LSASVGDRVT ITCRASQDIS NYLNWYQQKP GKAPKLLIYY TSRLHSGVPS | 60 |
| (light chain | RFSGSGSGTD YTLTISSLQP EDFATYYCQQ GNTLPWTFGQ GTKVEIKR | 108 |
| variable region) | | |
| SEQ ID NO: 558 | DIQMTQSPSS LSASVGDRVT ITCRASQDIS NYLNWYQQKP GKAVKLLIYY TSRLHSGVPS | 60 |
| (light chain | RFSGSGSGTD YTLTISSLQP EDFATYFCQQ GNTLPWTFGQ GTKVEIKR | 108 |
| variable region) | | |
| SEQ ID NO: 559 | QVQLVQSGAE VKKPGASVKV SCKASGYTFT SYVMHWVRQA PGQRLEWIGY INPYNDGTKY | 60 |
| (heavy chain | NEKFKGRATI TSDTSASTAY MELSSLRSED TAVYYCANYY GSSLSMDYWG QGTLVTVSS | 119 |
| variable region) | | |
| SEQ ID NO: 560 | QVQLVQSGAE VKKPGASVKV SCKASGYTFT SYVMHWVRQA PGQRLEWIGY INPYNDGTKY | 60 |
| (heavy chain | NEKFKGRATL TSDKSASTAY MELSSLRSED TAVYYCANYY GSSLSMDYWG QGTLVTVSS | 119 |
| variable region) | | |
| SEQ ID NO: 561 | QVQLVQSGAE VKKPGSSVKV SCKASGYTFK DYTMHWVRQA PGQGLEWMGG IYPNNGGSTY | 60 |
| (heavy chain | NQNFKDRVTI TADKSTSTAY MELSSLRSED TAVYYCARMG YHGPHLDFDV WGQGTTVTVS | 120 |
| variable region) | S | 121 |
| SEQ ID NO: 562 | DIQMTQSPSS LSASVGDRVT ITCKASQDVG AAVAWYQQKP GKAPKLLIYW ASTRHTGVPS | 60 |
| (light chain | RFSGSGSGTD FTLTISSLQP EDFATYYCQQ YINYPLTFGG GTKVEIKR | 108 |
| variable region) | | |
| SEQ ID NO: 563 | DIQMTQSPSS LSASVGDRVT ITCKASQDVG AAVAWYQQKP GKAPKLLIYW ASTRHTGVPD | 60 |
| (light chain | RFSGGGSGTD FTLTISSLQP EDFATYYCQQ YINYPLTFGG GTKVEIKR | 108 |
| variable region) | | |
| SEQ ID NO: 564 | QVQLVQSGAE VKKPGSSVKV SCKASGYTFK DYTMHWVRQA PGQGLEWIGG IYPNNGGSTY | 60 |
| (heavy chain | NQNFKDRVTL TADKSTSTAY MELSSLRSED TAVYYCARMG YHGPHLDFDV WGQGTTVTVS | 120 |
| variable region) | S | 121 |
| SEQ ID NO: 565 | QVQLVQSGAE VKKPGSSVKV SCKASGYTFK DYTMHWVRQA PGQGLEWIGG IYPNNGGSTY | 60 |
| (heavy chain | NQNFKDRATL TVDKSTSTAY MELSSLRSED TAVYYCARMG YHGPHLDFDV WGQGTTVTVS | 120 |
| variable region) | S | 121 |

[1318] In an embodiment, the OX40 agonist is L106 BD (Pharmingen Product #340420). In some embodiments, the antibody comprises at least one, two, three, four, five or six hypervariable region (HVR) sequences of antibody L106 (BD Pharmingen Product #340420). In some embodiments, the antibody comprises a heavy chain variable region sequence and/or a light chain variable region sequence of antibody L106 (BD Pharmingen Product #340420).

[1319] In an embodiment, the OX40 agonist is ACT35 (Santa Cruz Biotechnology, Catalog #20073). In some embodiments, the antibody comprises at least one, two, three, four, five or six hypervariable region (HVR) sequences of antibody ACT35 (Santa Cruz Biotechnology, Catalog #20073). In some embodiments, the antibody comprises a heavy chain variable region sequence and/or a light chain variable region sequence of antibody ACT35 (Santa Cruz Biotechnology, Catalog #20073).

[1320] In an embodiment, the OX40 agonist is the murine monoclonal antibody anti-mCD134/mOX40 (clone OX86), commercially available from InVivoMAb, BioXcell Inc, West Lebanon, N.H.

[1321] In an embodiment, the OX40 agonist is selected from the OX40 agonists described in International Patent Application Publication Nos. WO 95/12673, WO 95/21925, WO 2006/121810, WO 2012/027328, WO 2013/028231, WO 2013/038191, WO 2014/148895, European Patent Application EP 0672141, U.S. Pat. No. 7,504,101, U.S. Pat. No. 7,550,140, U.S. Pat. No. 7,622,444, U.S. Pat. No. 7,696,175, U.S. Pat. No. 7,960,515, and U.S. Pat. No. 7,961,515, and U.S. Patent Application Publication Nos. US 2010/0136030, US 2014/0377284, US 2015/0190506, and US 2015/0132288, the disclosure of each of which is incorporated herein by reference in its entirety.

### Pharmaceutical Compositions

[1322] In one embodiment, the invention provides a pharmaceutical composition for use in the treatment of the diseases and conditions described herein. In a preferred embodiment, the invention provides pharmaceutical compositions, including those described below, for use in the treatment of a hyperproliferative disease. In a preferred embodiment, the invention provides pharmaceutical compositions, including those described below, for use in the treatment of cancer.

[1323] In some embodiments, the invention provides pharmaceutical compositions for treating solid tumor cancers, lymphomas and leukemia.

[1324] In preferred embodiments, the invention provides a composition comprising therapeutically effective amounts of (1) a molecule selected from the group consisting of a GITR binding molecule, a 4-1BB agonist, an OX40 agonist, and combinations thereof or fragments, derivatives, conjugates, variants, biosimilars, and combinations thereof; and (2) a BTK inhibitor or a pharmaceutically acceptable salt, solvate, hydrate, cocrystal, or prodrug thereof, for use in the treatment of cancer. This composition is typically a pharmaceutical composition.

[1325] In preferred embodiments, the invention provides a composition comprising therapeutically effective amounts of (1) a molecule selected from the group consisting of a GITR binding molecule, a 4-1BB agonist, an OX40 agonist, and combinations thereof or fragments, derivatives, conjugates, variants, biosimilars, and combinations thereof; (2) a BTK inhibitor or a pharmaceutically acceptable salt, solvate, hydrate, cocrystal, or prodrug thereof; and (3) an anti-CD20 antibody selected from the group consisting of rituximab, obinutuzumab, ofatumumab, veltuzumab, tositumomab, ibritumomab, and fragments, derivatives, conjugates, variants, radioisotope-labeled complexes, and biosimilars thereof. This composition is typically a pharmaceutical composition.

[1326] In some embodiments, the invention provides a composition comprising therapeutically effective amounts of (1) a molecule selected from the group consisting of a GITR binding molecule, a 4-1BB agonist, an OX40 agonist, and combinations thereof or fragments, derivatives, conjugates, variants, biosimilars, and combinations thereof; (2) a BTK inhibitor or a pharmaceutically acceptable salt, solvate, hydrate, cocrystal, or prodrug thereof; and (3) a compound selected from the group consisting of albumin-bound paclitaxel, bendamustine, fludarabine, cyclophosphamide, chlorambucil, an anticoagulant or antiplatelet active pharmaceutical ingredient, or combinations thereof. This composition is typically a pharmaceutical composition.

[1327] In some embodiments, the invention provides a composition comprising therapeutically effective amounts of (1) a molecule selected from the group consisting of a GITR binding molecule, a 4-1BB agonist, an OX40 agonist, and combinations thereof or fragments, derivatives, conjugates, variants, biosimilars, and combinations thereof; (2) a BTK inhibitor or a pharmaceutically acceptable salt, solvate, hydrate, cocrystal, or prodrug thereof, for use in the treatment of cancer; (3) an anti-CD20 antibody selected from the group consisting of rituximab, obinutuzumab, ofatumumab, veltuzumab, tositumomab, ibritumomab, and fragments, derivatives, conjugates, variants, radioisotope-labeled complexes, biosimilars thereof, and combinations thereof; and (4) a compound selected from the group consisting of albumin-bound paclitaxel, bendamustine, fludarabine, cyclophosphamide, chlorambucil, an anticoagulant or antiplatelet active pharmaceutical ingredient, and combinations thereof. This composition is typically a pharmaceutical composition.

[1328] In some embodiments, the invention provides a composition comprising therapeutically effective amounts of (1) a molecule selected from the group consisting of a GITR binding molecule, a 4-1BB agonist, an OX40 agonist, and combinations thereof or fragments, derivatives, conjugates, variants, biosimilars, and combinations thereof; and (2) a BTK inhibitor having the structure:

[chemical structure]

or a pharmaceutically acceptable salt, solvate, hydrate, cocrystal, or prodrug thereof. This composition is typically a pharmaceutical composition.

[1329] In some embodiments, the invention provides a composition comprising therapeutically effective amounts of (1) a molecule selected from the group consisting of a GITR binding molecule, a 4-1BB agonist, an OX40 agonist, and combinations thereof or fragments, derivatives, conjugates, variants, biosimilars, and combinations thereof; and (2) a BTK inhibitor having the structure:

[chemical structure]

or a pharmaceutically acceptable salt, solvate, hydrate, cocrystal, or prodrug thereof.

[1330] In some embodiments, the invention provides a composition comprising therapeutically effective amounts of (1) a molecule selected from the group consisting of a GITR binding molecule, a 4-1BB agonist, an OX40 agonist, and combinations thereof or fragments, derivatives, conjugates, variants, biosimilars, and combinations thereof; and (2) a BTK inhibitor having the structure:

[chemical structure]

or a pharmaceutically acceptable salt, solvate, hydrate, cocrystal, or prodrug thereof.

[1331] In some embodiments, the invention provides a composition comprising therapeutically effective amounts of (1) a molecule selected from the group consisting of a GITR binding molecule, a 4-1BB agonist, an OX40 agonist, and combinations thereof or fragments, derivatives, conjugates, variants, biosimilars, and combinations thereof; and (2) a BTK inhibitor having the structure:

[chemical structure]

or a pharmaceutically acceptable salt, solvate, hydrate, cocrystal, or prodrug thereof.

[1332] In some embodiments, the invention provides a composition comprising therapeutically effective amounts of (1) a molecule selected from the group consisting of a GITR binding molecule, a 4-1BB agonist, an OX40 agonist, and combinations thereof or fragments, derivatives, conjugates, variants, biosimilars, and combinations thereof; and (2) a BTK inhibitor having the structure:

[chemical structure]

or a pharmaceutically acceptable salt, solvate, hydrate, cocrystal, or prodrug thereof.

[1333] In some embodiments, the invention provides a composition comprising therapeutically effective amounts of (1) a molecule selected from the group consisting of a GITR binding molecule, a 4-1BB agonist, an OX40 agonist, and combinations thereof or fragments, derivatives, conjugates, variants, biosimilars, and combinations thereof; and (2) a BTK inhibitor selected from the group consisting of:

[chemical structure]

and pharmaceutically-acceptable salts, cocrystals, hydrates, solvates, and prodrugs thereof. This composition is typically a pharmaceutical composition.

[1334] In some embodiments, the invention provides a composition comprising therapeutically effective amounts of (1) a molecule selected from the group consisting of a GITR binding molecule, a 4-1BB agonist, an OX40 agonist, and combinations thereof or a pharmaceutically acceptable salt, solvate, hydrate, cocrystal, or prodrug thereof; (2) a BTK inhibitor selected from the group consisting of:

[chemical structure]

and pharmaceutically-acceptable salts, cocrystals, hydrates, solvates, and prodrugs thereof; and (3) an anti-CD20 antibody selected from the group consisting of rituximab, obinutuzumab, ofatumumab, veltuzumab, tositumomab, ibritumomab, and fragments, derivatives, conjugates, variants, radioisotope-labeled complexes, and biosimilars thereof. This composition is typically a pharmaceutical composition.

[1335] In some embodiments, the invention provides a composition comprising therapeutically effective amounts of (1) a GITR binding molecule selected from the group consisting of TRX518, 6C8, 36E5, 3D6, 61G6, 6H6, 61F6, 1D8, 17F10, 35D8, 49A1, 9E5, 31H6, 1D7, 33C9, 33F6, 34G4, 35B10, 41E11, 41G5, 42A11, 44C1, 45A8, 46E11, 48H12, 48H7, 49D9, 49E2, 48A9, 5H7, 7A10, 9H6, and fragments, derivatives, conjugates, variants, biosimilars, and combinations thereof; and (2) a BTK inhibitor or a pharmaceutically acceptable salt, solvate, hydrate, cocrystal, or prodrug thereof. This composition is typically a pharmaceutical composition.

[1336] In some embodiments, the invention provides a composition comprising therapeutically effective amounts of (1) a GITR binding molecule selected from the group consisting of TRX518, 6C8, 36E5, 3D6, 61G6, 6H6, 61F6, 1D8, 17F10, 35D8, 49A1, 9E5, 31H6, 1D7, 33C9, 33F6, 34G4, 35B10, 41E11, 41G5, 42A11, 44C1, 45A8, 46E11, 48H12, 48H7, 49D9, 49E2, 48A9, 5H7, 7A10, 9H6, and fragments, derivatives, conjugates, variants, biosimilars, and combinations thereof; and (2) a BTK inhibitor or a pharmaceutically acceptable salt, solvate, hydrate, cocrystal, or prodrug thereof. This composition is typically a pharmaceutical composition.

[1337] In some embodiments, the invention provides a composition comprising therapeutically effective amounts of (1) a GITR binding molecule selected from the group consisting of TRX518, 6C8, 36E5, 3D6, 61G6, 6H6, 61F6, 1D8, 17F10, 35D8, 49A1, 9E5, 31H6, 1D7, 33C9, 33F6, 34G4, 35B10, 41E11, 41G5, 42A11, 44C1, 45A8, 46E11, 48H12, 48H7, 49D9, 49E2, 48A9, 5H7, 7A10, 9H6, and fragments, derivatives, conjugates, variants, biosimilars, and combinations thereof; (2) a BTK inhibitor or a pharmaceutically acceptable salt, solvate, hydrate, cocrystal, or prodrug thereof, for use in the treatment of cancer; and (3) an anti-CD20 antibody selected from the group consisting of rituximab, obinutuzumab, ofatumumab, veltuzumab, tositumomab, ibritumomab, and fragments, derivatives, conjugates, variants, and biosimilars thereof. This composition is typically a pharmaceutical composition.

[1338] In some embodiments, the invention provides a composition comprising therapeutically effective amounts of (1) a 4-1BB agonist selected from the group consisting of PF-05082566 (Pfizer), 1D8, 3Elor, 20H4.9-IgG4 (10C7 or BMS-663513; urelumab), 4B4 (BioLegend 309809), H4-1BB-M127 (BD Pharmingen 552532), BBK2 (Thermo Fisher MS621PABX), 145501 (Leinco Technologies B591), antibody produced by cell line deposited as ATCC No. HB-11248, BioLegend 31 1503), C65-485 (BD Pharmingen 559446), 20H4.9-IgG1 (BMS-663031), 4E9, BMS-554271, BMS-469492, 3H3, BMS-469497, 3E1, 53A2, and 3B8, and including antibodies, antibody fragments, derivatives, conjugates, variants, and biosimilars thereof; and (2) a BTK inhibitor or a pharmaceutically acceptable salt, solvate, hydrate, cocrystal, or prodrug thereof. This composition is typically a pharmaceutical composition.

[1339] In some embodiments, the invention provides a composition comprising therapeutically effective amounts of (1) an OX40 agonist selected from the group consisting of: MEDI6469 (MedImmune), MEDI0562 (MedImmune), MEDI6383 (MedImmune), MOXR0916 (Genentech), GSK3174998, and including antibodies, antibody fragments, derivatives, conjugates, variants, and biosimilars thereof; and (2) a BTK inhibitor or a pharmaceutically acceptable salt, solvate, hydrate, cocrystal, or prodrug thereof. This composition is typically a pharmaceutical composition.

[1340] The pharmaceutical compositions are typically formulated to provide a therapeutically effective amount of a combination as described herein, i.e., a combination of a GITR binding molecule and a BTK inhibitor as the active ingredients, or pharmaceutically acceptable salts, prodrugs, solvates, or hydrates thereof. Where desired, the pharmaceutical compositions contain a pharmaceutically acceptable salt and/or coordination complex of one or more of the active ingredients. Typically, the pharmaceutical compositions also comprise one or more pharmaceutically acceptable excipients, carriers, including inert solid diluents and fillers, diluents, including sterile aqueous solution and various organic solvents, permeation enhancers, solubilizers and adjuvants.

[1341] The pharmaceutical compositions described above are preferably for use in the treatment of the diseases and conditions described below. In a preferred embodiment, the pharmaceutical compositions are for use in the treatment of cancer. In preferred embodiments, the pharmaceutical compositions are for use in treating solid tumor cancers, lymphomas, and leukemias.

[1342] In a preferred embodiment, the pharmaceutical compositions of the present invention are for use in the treatment of cancer. In one embodiment, the pharmaceutical compositions of the present invention are for use in the treatment of a cancer selected from the group consisting of bladder cancer, squamous cell carcinoma including head and neck cancer, pancreatic ductal adenocarcinoma (PDA), pancreatic cancer, colon carcinoma, mammary carcinoma, breast cancer, fibrosarcoma, mesothelioma, renal cell carcinoma, lung carcinoma, thyoma, prostate cancer, colorectal cancer, ovarian cancer, acute myeloid leukemia, thymus cancer, brain cancer, squamous cell cancer, skin cancer, eye cancer, retinoblastoma, melanoma, intraocular melanoma, oral cavity and oropharyngeal cancers, gastric cancer, stomach cancer, cervical cancer, renal cancer, kidney cancer, liver cancer, ovarian cancer, esophageal cancer, testicular cancer, gynecological cancer, thyroid cancer, acquired immune deficiency syndrome (AIDS)-related cancers (e.g., lymphoma and Kaposi's sarcoma), viral-induced cancer, glioblastoma, esophogeal tumors, hematological neoplasms, non-small-cell lung cancer, chronic myelocytic leukemia, diffuse large B-cell lymphoma, esophagus tumor, follicle center lymphoma, head and neck tumor, hepatitis C virus infection, hepatocellular carcinoma, Hodgkin's disease, metastatic colon cancer, multiple myeloma, non-Hodgkin's lymphoma, indolent non-Hodgkin's lymphoma, ovary tumor, pancreas tumor, renal cell carcinoma, small-cell lung cancer, stage IV melanoma, chronic lymphocytic leukemia, B-cell acute lymphoblastic leukemia (ALL), mature B-cell ALL, follicular lymphoma, mantle cell lymphoma, and Burkitt's lymphoma.

[1343] The pharmaceutical compositions may be administered as a combination of a BTK inhibitor and a molecule selected from the group consisting of a GITR binding molecule, a 4-1BB agonist, an OX40 agonist, and combinations thereof. Where desired, other active pharmaceutical ingredient(s) may be mixed into a preparation or two or more components of the combination may be formulated into separate preparations for use in combination separately or at the same time. A kit containing the components of the combination, formulated into separate preparations for said use, in also provided by the invention.

[1344] In an embodiment, the molar ratio of the molecule selected from the group consisting of a GITR binding molecule, a 4-1BB agonist, an OX40 agonist, and combinations thereof to the BTK inhibitor in the pharmaceutical compositions is in the range from about 10:1 to about 1:10, preferably from about 2.5:1 to about 1:2.5, and more preferably about 1:1. In an embodiment, the weight ratio of the molecule selected from the group consisting of a GITR binding molecule, a 4-1BB agonist, an OX40 agonist, and combinations thereof to the BTK inhibitor in the pharmaceutical compositions is selected from the group consisting of about 20:1, about 19:1, about 18:1, about 17:1, about 16:1, about 15:1, about 14:1, about 13:1, about 12:1, about 11:1, about 10:1, about 9:1, about 8:1, about 7:1, about 6:1, about 5:1, about 4:1, about 3:1, about 2:1, about 1:1, about 1:2, about 1:3, about 1:4, about 1:5, about 1:6, about 1:7, about 1:8, about 1:9, about 1:10, about 1:11, about 1:12, about 1:13, about 1:14, about 1:15, about 1:16, about 1:17, about 1:18, about 1:19, and about 1:20.

[1345] In some embodiments, the concentration of the BTK inhibitor or the molecule selected from the group consisting of a GITR binding molecule, a 4-1BB agonist, an OX40 agonist, and combinations thereof provided in the pharmaceutical compositions of the invention is independently less than, for example, 100%, 90%, 80%, 70%, 60%, 50%, 40%, 30%, 20%, 19%, 18%, 17%, 16%, 15%, 14%, 13%, 12%, 11%, 10%, 9%, 8%, 7%, 6%, 5%, 4%, 3%, 2%, 1%, 0.5%, 0.4%, 0.3%, 0.2%, 0.1%, 0.09%, 0.08%, 0.07%, 0.06%, 0.05%, 0.04%, 0.03%, 0.02%, 0.01%, 0.009%, 0.008%, 0.007%, 0.006%, 0.005%, 0.004%, 0.003%, 0.002%, 0.001%, 0.0009%, 0.0008%, 0.0007%, 0.0006%, 0.0005%, 0.0004%, 0.0003%, 0.0002% or 0.0001% w/w, w/v or v/v of the pharmaceutical composition.

[1346] In some embodiments, the concentration of the BTK inhibitor or the molecule selected from the group consisting of a GITR binding molecule, a 4-1BB agonist, an OX40 agonist, and combinations thereof provided in the pharmaceutical compositions of the invention is independently greater than 90%, 80%, 70%, 60%, 50%, 40%, 30%, 20%, 19.75%, 19.50%, 19.25% 19%, 18.75%, 18.50%, 18.25% 18%, 17.75%, 17.50%, 17.25% 17%, 16.75%, 16.50%, 16.25% 16%, 15.75%, 15.50%, 15.25% 15%, 14.75%, 14.50%, 14.25% 14%, 13.75%, 13.50%, 13.25% 13%, 12.75%, 12.50%, 12.25% 12%, 11.75%, 11.50%, 11.25% 11%, 10.75%, 10.50%, 10.25% 10%, 9.75%, 9.50%, 9.25% 9%, 8.75%, 8.50%, 8.25% 8%, 7.75%, 7.50%, 7.25% 7%, 6.75%, 6.50%, 6.25% 6%, 5.75%, 5.50%, 5.25% 5%, 4.75%, 4.50%, 4.25%, 4%, 3.75%, 3.50%, 3.25%, 3%, 2.75%, 2.50%, 2.25%, 2%, 1.75%, 1.50%, 125%, 1%, 0.5%, 0.4%, 0.3%, 0.2%, 0.1%, 0.09%, 0.08%, 0.07%, 0.06%, 0.05%, 0.04%, 0.03%, 0.02%, 0.01%, 0.009%, 0.008%, 0.007%, 0.006%, 0.005%, 0.004%, 0.003%, 0.002%, 0.001%, 0.0009%, 0.0008%, 0.0007%, 0.0006%, 0.0005%, 0.0004%, 0.0003%, 0.0002% or 0.0001% w/w, w/v, or v/v of the pharmaceutical composition.

[1347] In some embodiments, the concentration of the BTK inhibitor or the molecule selected from the group consisting of a GITR binding molecule, a 4-1BB agonist, an OX40 agonist, and combinations thereof provided in the pharmaceutical compositions is independently in the range from about 0.0001% to about 50%, about 0.001% to about 40%, about 0.01% to about 30%, about 0.02% to about 29%, about 0.03% to about 28%, about 0.04% to about 27%, about 0.05% to about 26%, about 0.06% to about 25%, about 0.07% to about 24%, about 0.08% to about 23%, about 0.09% to about 22%, about 0.1% to about 21%, about 0.2% to about 20%, about 0.3% to about 19%, about 0.4% to about 18%, about 0.5% to about 17%, about 0.6% to about 16%, about 0.7% to about 15%, about 0.8% to about 14%, about 0.9% to about 12% or about 1% to about 10% w/w, w/v or v/v of the pharmaceutical composition.

[1348] In some embodiments, the concentration of the BTK inhibitor or the molecule selected from the group consisting of a GITR binding molecule, a 4-1BB agonist, an OX40 agonist, and combinations thereof provided in the pharmaceutical compositions is independently in the range from about 0.001% to about 10%, about 0.01% to about 5%, about 0.02% to about 4.5%, about 0.03% to about 4%, about 0.04% to about 3.5%, about 0.05% to about 3%, about 0.06% to about 2.5%, about 0.07% to about 2%, about 0.08% to about 1.5%, about 0.09% to about 1%, about 0.1% to about 0.9% w/w, w/v or v/v of the pharmaceutical composition.

[1349] In some embodiments, the amount of the BTK inhibitor or the molecule selected from the group consisting of a GITR binding molecule, a 4-1BB agonist, an OX40 agonist, and combinations thereof provided in the pharmaceutical compositions is independently equal to or less than 10 g, 9.5 g, 9.0 g, 8.5 g, 8.0 g, 7.5 g, 7.0 g, 6.5 g, 6.0 g, 5.5 g, 5.0 g, 4.5 g, 4.0 g, 3.5 g, 3.0 g, 2.5 g, 2.0 g, 1.5 g, 1.0 g, 0.95 g, 0.9 g, 0.85 g, 0.8 g, 0.75 g, 0.7 g, 0.65 g, 0.6 g, 0.55 g, 0.5 g, 0.45 g, 0.4 g, 0.35 g, 0.3 g, 0.25 g, 0.2 g, 0.15 g, 0.1 g, 0.09 g, 0.08 g, 0.07 g, 0.06 g, 0.05 g, 0.04 g, 0.03 g, 0.02 g, 0.01 g, 0.009 g, 0.008 g, 0.007 g, 0.006 g, 0.005 g, 0.004 g, 0.003 g, 0.002 g, 0.001 g, 0.0009 g, 0.0008 g, 0.0007 g, 0.0006 g, 0.0005 g, 0.0004 g, 0.0003 g, 0.0002 g, or 0.0001 g.

[1350] In some embodiments, the amount of the BTK inhibitor or the molecule selected from the group consisting of a GITR binding molecule, a 4-1BB agonist, an OX40 agonist, and combinations thereof provided in the pharmaceutical compositions is independently more than 0.0001 g, 0.0002 g, 0.0003 g, 0.0004 g, 0.0005 g, 0.0006 g, 0.0007 g, 0.0008 g, 0.0009 g, 0.001 g, 0.0015 g, 0.002 g, 0.0025 g, 0.003 g, 0.0035 g, 0.004 g, 0.0045 g, 0.005 g, 0.0055 g, 0.006 g, 0.0065 g, 0.007 g, 0.0075 g, 0.008 g, 0.0085 g, 0.009 g, 0.0095 g, 0.01 g, 0.015 g, 0.02 g, 0.025 g, 0.03 g, 0.035 g, 0.04 g, 0.045 g, 0.05 g, 0.055 g, 0.06 g, 0.065 g, 0.07 g, 0.075 g, 0.08 g, 0.085 g, 0.09 g, 0.095 g, 0.1 g, 0.15 g, 0.2 g, 0.25 g, 0.3 g, 0.35 g, 0.4 g, 0.45 g, 0.5 g, 0.55 g, 0.6 g, 0.65 g, 0.7 g, 0.75 g, 0.8 g, 0.85 g, 0.9 g, 0.95 g, 1 g, 1.5 g, 2 g, 2.5, 3 g, 3.5, 4 g, 4.5 g, 5 g, 5.5 g, 6 g, 6.5 g, 7 g, 7.5 g, 8 g, 8.5 g, 9 g, 9.5 g, or 10 g.

[1351] The BTK inhibitor and/or the molecule selected from the group consisting of a GITR binding molecule, a 4-1BB agonist, an OX40 agonist, and combinations thereof according to the invention is effective over a wide dosage range. For example, in the treatment of adult humans, dosages independently ranging from 0.01 to 1000 mg, from 0.5 to 100 mg, from 1 to 50 mg per day, and from 5 to 40 mg per day are examples of dosages that may be used. The exact dosage will depend upon the route of administration, the form in which the compound is administered, the gender and age of the subject to be treated, the body weight of the subject to be treated, and the preference and experience of the attending physician.

[1352] In a preferred embodiment, the pharmaceutical compositions of the present invention are for use in the treatment of cancer. In a preferred embodiment, the pharmaceutical compositions of the present invention are for use in the treatment of a cancer selected from the group consisting of bladder cancer, squamous cell carcinoma including head and neck cancer, pancreatic ductal adenocarcinoma (PDA), pancreatic cancer, colon carcinoma, mammary carcinoma, breast cancer, fibrosarcoma, mesothelioma, renal cell carcinoma, lung carcinoma, thyoma, prostate cancer, colorectal cancer, ovarian cancer, acute myeloid leukemia, thymus cancer, brain cancer, squamous cell cancer, skin cancer, eye cancer, retinoblastoma, melanoma, intraocular melanoma, oral cavity and oropharyngeal cancers, gastric cancer, stomach cancer, cervical cancer, renal cancer, kidney cancer, liver cancer, ovarian cancer, esophageal cancer, testicular cancer, gynecological cancer, thyroid cancer, acquired immune deficiency syndrome (AIDS)-related cancers (e.g., lymphoma and Kaposi's sarcoma), viral-induced cancer, glioblastoma, esophogeal tumors, hematological neoplasms, non-small-cell lung cancer, chronic myelocytic leukemia, diffuse large B-cell lymphoma, esophagus tumor, follicle center lymphoma, head and neck tumor, hepatitis C virus infection, hepatocellular carcinoma, Hodgkin's disease, metastatic colon cancer, multiple myeloma, non-Hodgkin's lymphoma, indolent non-Hodgkin's lymphoma, ovary tumor, pancreas tumor, renal cell carcinoma, small-cell lung cancer, stage IV melanoma, chronic lymphocytic leukemia, B-cell acute lymphoblastic leukemia (ALL), mature B-cell ALL, follicular lymphoma, mantle cell lymphoma, and Burkitt's lymphoma.

[1353] Described below are non-limiting pharmaceutical compositions and methods for preparing the same.

### Pharmaceutical Compositions for Oral Administration

[1354] In preferred embodiments, the invention provides a pharmaceutical composition for oral administration containing a combination of a BTK inhibitor and a molecule selected from the group consisting of a GITR binding molecule, a 4-1BB agonist, an OX40 agonist, and combinations thereof, and a pharmaceutical excipient suitable for oral administration.

[1355] In preferred embodiments, the invention provides a solid pharmaceutical composition for oral administration containing: (i) an effective amount of a molecule selected from the group consisting of a GITR binding molecule, a 4-1BB agonist, an OX40 agonist, and combinations thereof and a BTK inhibitor in combination and (ii) a pharmaceutical excipient suitable for oral administration. In some embodiments, the composition further contains (iii) an effective amount of a third or fourth active pharmaceutical ingredient.

[1356] In some embodiments, the pharmaceutical composition may be a liquid pharmaceutical composition suitable for oral consumption.

[1357] Pharmaceutical compositions of the invention suitable for oral administration can be presented as discrete dosage forms, such as capsules, sachets, tablets, liquids, or aerosol sprays each containing a predetermined amount of an active ingredient as a powder or in granules, a solution, or a suspension in an aqueous or non-aqueous liquid, an oil-in-water emulsion, a water-in-oil liquid emulsion, powders for reconstitution, powders for oral consumptions, bottles (including powders or liquids in a bottle), orally dissolving films, lozenges, pastes, tubes, gums, and packs. Such dosage forms can be prepared by any of the methods of pharmacy, but all methods include the step of bringing the active ingredient(s) into association with the carrier, which constitutes one or more necessary ingredients. In general, the compositions are prepared by uniformly and intimately admixing the active ingredient(s) with liquid carriers or finely divided solid carriers or both, and then, if necessary, shaping the product into the desired presentation. For example, a tablet can be prepared by compression or molding, optionally with one or more accessory ingredients. Compressed tablets can be prepared by compressing in a suitable machine the active ingredient in a free-flowing form such as powder or granules, optionally mixed with an excipient such as, but not limited to, a binder, a lubricant, an inert diluent, and/or a surface active or dispersing agent. Molded tablets can be made by molding in a suitable machine a mixture of the powdered compound moistened with an inert liquid diluent.

[1358] The invention further encompasses anhydrous pharmaceutical compositions and dosage forms since water can facilitate the degradation of some compounds. For example, water may be added (e.g., 5%) in the pharmaceutical arts as a means of simulating long-term storage in order to determine characteristics such as shelf-life or the stability of formulations over time. Anhydrous pharmaceutical compositions and dosage forms of the invention can be prepared using anhydrous or low moisture containing ingredients and low moisture or low humidity conditions. Pharmaceutical compositions and dosage forms of the invention which contain lactose can be made anhydrous if substantial contact with moisture and/or humidity during manufacturing, packaging, and/or storage is expected. An anhydrous pharmaceutical composition may be prepared and stored such that its anhydrous nature is maintained. Accordingly, anhydrous compositions may be packaged using materials known to prevent exposure to water such that they can be included in suitable formulary kits. Examples of suitable packaging include, but are not limited to, hermetically sealed foils, plastic or the like, unit dose containers, blister packs, and strip packs.

[1359] Each of the molecule selected from the group consisting of a GITR binding molecule, a 4-1BB agonist, an OX40 agonist, and combinations thereof and BTK inhibitors as active ingredients can be combined in an intimate admixture with a pharmaceutical carrier according to conventional pharmaceutical compounding techniques. The carrier can take a wide variety of forms depending on the form of preparation desired for administration. In preparing the compositions for an oral dosage form, any of the usual pharmaceutical media can be employed as carriers, such as, for example, water, glycols, oils, alcohols, flavoring agents, preservatives, coloring agents, and the like in the case of oral liquid preparations (such as suspensions, solutions, and elixirs) or aerosols; or carriers such as starches, sugars, microcrystalline cellulose, diluents, granulating agents, lubricants, binders, and disintegrating agents can be used in the case of oral solid preparations, in some embodiments without employing the use of lactose. For example, suitable carriers include powders, capsules, and tablets, with the solid oral preparations. If desired, tablets can be coated by standard aqueous or nonaqueous techniques.

[1360] Binders suitable for use in pharmaceutical compositions and dosage forms include, but are not limited to, corn starch, potato starch, or other starches, gelatin, natural and synthetic gums such as acacia, sodium alginate, alginic acid, other alginates, powdered tragacanth, guar gum, cellulose and its derivatives (e.g., ethyl cellulose, cellulose acetate, carboxymethyl cellulose calcium, sodium carboxymethyl cellulose), polyvinyl pyrrolidone, methyl cellulose, pre-gelatinized starch, hydroxypropyl methyl cellulose, microcrystalline cellulose, and mixtures thereof.

[1361] Examples of suitable fillers for use in the pharmaceutical compositions and dosage forms disclosed herein include, but are not limited to, talc, calcium carbonate (e.g., granules or powder), microcrystalline cellulose, powdered cellulose, dextrates, kaolin, mannitol, silicic acid, sorbitol, starch, pre-gelatinized starch, and mixtures thereof.

[1362] Disintegrants may be used in the compositions of the invention to provide tablets that disintegrate when exposed to an aqueous environment. Too much of a disintegrant may produce tablets which disintegrate in the bottle. Too little may be insufficient for disintegration to occur, thus altering the rate and extent of release of the active ingredients from the dosage form. Thus, a sufficient amount of disintegrant that is neither too little nor too much to detrimentally alter the release of the active ingredient(s) may be used to form the dosage forms of the compounds disclosed herein. The amount of disintegrant used may vary based upon the type of formulation and mode of administration, and may be readily discernible to those of ordinary skill in the art. About 0.5 to about 15 weight percent of disintegrant, or about 1 to about 5 weight percent of disintegrant, may be used in the pharmaceutical composition. Disintegrants that can be used to form pharmaceutical compositions and dosage forms of the invention include, but are not limited to, agar-agar, alginic acid, calcium carbonate, microcrystalline cellulose, croscarmellose sodium, crospovidone, polacrilin potassium, sodium starch glycolate, potato or tapioca starch, other starches, pre-gelatinized starch, other starches, clays, other algins, other celluloses, gums or mixtures thereof.

[1363] Lubricants which can be used to form pharmaceutical compositions and dosage forms of the invention include, but are not limited to, calcium stearate, magnesium stearate, sodium stearyl fumarate, mineral oil, light mineral oil, glycerin, sorbitol, mannitol, polyethylene glycol, other glycols, stearic acid, sodium lauryl sulfate, talc, hydrogenated vegetable oil (e.g., peanut oil, cottonseed oil, sunflower oil, sesame oil, olive oil, corn oil, and soybean oil), zinc stearate, ethyl oleate, ethylaureate, agar, or mixtures thereof. Additional lubricants include, for example, a syloid silica gel, a coagulated aerosol of synthetic silica, silicified microcrystalline cellulose, or mixtures thereof. A lubricant can optionally be added in an amount of less than about 0.5% or less than about 1% (by weight) of the pharmaceutical composition.

[1364] When aqueous suspensions and/or elixirs are desired for oral administration, the active pharmaceutical ingredient(s) may be combined with various sweetening or flavoring agents, coloring matter or dyes and, if so desired, emulsifying and/or suspending agents, together with such diluents as water, ethanol, propylene glycol, glycerin and various combinations thereof.

[1365] The tablets can be uncoated or coated by known techniques to delay disintegration and absorption in the gastrointestinal tract and thereby provide a sustained action over a longer period. For example, a time delay material such as glyceryl monostearate or glyceryl distearate can be employed. Formulations for oral use can also be presented as hard gelatin capsules wherein the active ingredient is mixed with an inert solid diluent, for example, calcium carbonate, calcium phosphate or kaolin, or as soft gelatin capsules wherein the active ingredient is mixed with water or an oil medium, for example, peanut oil, liquid paraffin or olive oil.

[1366] Surfactants which can be used to form pharmaceutical compositions and dosage forms of the invention include, but are not limited to, hydrophilic surfactants, lipophilic surfactants, and mixtures thereof. That is, a mixture of hydrophilic surfactants may be employed, a mixture of lipophilic surfactants may be employed, or a mixture of at least one hydrophilic surfactant and at least one lipophilic surfactant may be employed.

[1367] A suitable hydrophilic surfactant may generally have an HLB value of at least 10, while suitable lipophilic surfactants may generally have an HLB value of or less than about 10. An empirical parameter used to characterize the relative hydrophilicity and hydrophobicity of non-ionic amphiphilic compounds is the hydrophilic-lipophilic balance (“HLB” value). Surfactants with lower HLB values are more lipophilic or hydrophobic, and have greater solubility in oils, while surfactants with higher HLB values are more hydrophilic, and have greater solubility in aqueous solutions. Hydrophilic surfactants are generally considered to be those compounds having an HLB value greater than about 10, as well as anionic, cationic, or zwitterionic compounds for which the HLB scale is not generally applicable. Similarly, lipophilic (i.e., hydrophobic) surfactants are compounds having an HLB value equal to or less than about 10. However, HLB value of a surfactant is merely a rough guide generally used to enable formulation of industrial, pharmaceutical and cosmetic emulsions.

[1368] Hydrophilic surfactants may be either ionic or non-ionic. Suitable ionic surfactants include, but are not limited to, alkylammonium salts; fusidic acid salts; fatty acid derivatives of amino acids, oligopeptides, and polypeptides; glyceride derivatives of amino acids, oligopeptides, and polypeptides; lecithins and hydrogenated lecithins; lysolecithins and hydrogenated lysolecithins; phospholipids and derivatives thereof; lysophospholipids and derivatives thereof; carnitine fatty acid ester salts; salts of alkylsulfates; fatty acid salts; sodium docusate; acylactylates; mono- and di-acetylated tartaric acid esters of mono- and di-glycerides; succinylated mono- and di-glycerides; citric acid esters of mono- and di-glycerides; and mixtures thereof.

[1369] Within the aforementioned group, ionic surfactants include, by way of example: lecithins, lysolecithin, phospholipids, lysophospholipids and derivatives thereof; carnitine fatty acid ester salts; salts of alkylsulfates; fatty acid salts; sodium docusate; acylactylates; mono- and di-acetylated tartaric acid esters of mono- and di-glycerides; succinylated mono- and di-glycerides; citric acid esters of mono- and di-glycerides; and mixtures thereof.

[1370] Ionic surfactants may be the ionized forms of lecithin, lysolecithin, phosphatidylcholine, phosphatidylethanolamine, phosphatidylglycerol, phosphatidic acid, phosphatidylserine, lysophosphatidylcholine, lysophosphatidylethanolamine, lysophosphatidylglycerol, lysophosphatidic acid, lysophosphatidylserine, PEG-phosphatidylethanolamine, PVP-phosphatidylethanolamine, lactylic esters of fatty acids, stearoyl-2-lactylate, stearoyl lactylate, succinylated monoglycerides, mono/diacetylated tartaric acid esters of mono/diglycerides, citric acid esters of mono/diglycerides, cholylsarcosine, caproate, caprylate, caprate, laurate, myristate, palmitate, oleate, ricinoleate, linoleate, linolenate, stearate, lauryl sulfate, teracecyl sulfate, docusate, lauroyl carnitines, palmitoyl carnitines, myristoyl carnitines, and salts and mixtures thereof.

[1371] Hydrophilic non-ionic surfactants may include, but not limited to, alkylglucosides; alkylmaltosides; alkylthioglucosides; lauryl macrogolglycerides; polyoxyalkylene alkyl ethers such as polyethylene glycol alkyl ethers; polyoxyalkylene alkylphenols such as polyethylene glycol alkyl phenols; polyoxyalkylene alkyl phenol fatty acid esters such as polyethylene glycol fatty acids monoesters and polyethylene glycol fatty acids diesters; polyethylene glycol glycerol fatty acid esters; polyglycerol fatty acid esters; polyoxyalkylene sorbitan fatty acid esters such as polyethylene glycol sorbitan fatty acid esters; hydrophilic transesterification products of a polyol with at least one member of the group consisting of glycerides, vegetable oils, hydrogenated vegetable oils, fatty acids, and sterols; polyoxyethylene sterols, derivatives, and analogues thereof; polyoxyethylated vitamins and derivatives thereof; polyoxyethylene-polyoxypropylene block copolymers; and mixtures thereof; polyethylene glycol sorbitan fatty acid esters and hydrophilic transesterification products of a polyol with at least one member of the group consisting of triglycerides, vegetable oils, and hydrogenated vegetable oils. The polyol may be glycerol, ethylene glycol, polyethylene glycol, sorbitol, propylene glycol, pentaerythritol, or a saccharide.

[1372] Other hydrophilic-non-ionic surfactants include, without limitation, PEG-10 laurate, PEG-12 laurate, PEG-20 laurate, PEG-32 laurate, PEG-32 dilaurate, PEG-12 oleate, PEG-15 oleate, PEG-20 oleate, PEG-20 dioleate, PEG-32 oleate, PEG-200 oleate, PEG-400 oleate, PEG-15 stearate, PEG-32 distearate, PEG-40 stearate, PEG-100 stearate, PEG-20 dilaurate, PEG-25 glyceryl trioleate, PEG-32 dioleate, PEG-20 glyceryl laurate, PEG-30 glyceryl laurate, PEG-20 glyceryl stearate, PEG-20 glyceryl oleate, PEG-30 glyceryl oleate, PEG-30 glyceryl laurate, PEG-40 glyceryl laurate, PEG-40 palm kernel oil, PEG-50 hydrogenated castor oil, PEG-40 castor oil, PEG-35 castor oil, PEG-60 castor oil, PEG-40 hydrogenated castor oil, PEG-60 hydrogenated castor oil, PEG-60 corn oil, PEG-6 caprate/caprylate glycerides, PEG-8 caprate/caprylate glycerides, polyglyceryl-10 laurate, PEG-30 cholesterol, PEG-25 phyto sterol, PEG-30 soya sterol, PEG-20 trioleate, PEG-40 sorbitan oleate, PEG-80 sorbitan laurate, polysorbate 20, polysorbate 80, POE-9 lauryl ether, POE-23 lauryl ether, POE-10 oleyl ether, POE-20 oleyl ether, POE-20 stearyl ether, tocopheryl PEG-100 succinate, PEG-24 cholesterol, polyglyceryl-10 oleate, Tween 40, Tween 60, sucrose monostearate, sucrose monolaurate, sucrose monopalmitate, PEG 10-100 nonyl phenol series, PEG 15-100 octyl phenol series, and poloxamers.

[1373] Suitable lipophilic surfactants include, by way of example only: fatty alcohols; glycerol fatty acid esters; acetylated glycerol fatty acid esters; lower alcohol fatty acids esters; propylene glycol fatty acid esters; sorbitan fatty acid esters; polyethylene glycol sorbitan fatty acid esters; sterols and sterol derivatives; polyoxyethylated sterols and sterol derivatives; polyethylene glycol alkyl ethers; sugar esters; sugar ethers; lactic acid derivatives of mono- and di-glycerides; hydrophobic transesterification products of a polyol with at least one member of the group consisting of glycerides, vegetable oils, hydrogenated vegetable oils, fatty acids and sterols; oil-soluble vitamins/vitamin derivatives; and mixtures thereof. Within this group, preferred lipophilic surfactants include glycerol fatty acid esters, propylene glycol fatty acid esters, and mixtures thereof, or are hydrophobic transesterification products of a polyol with at least one member of the group consisting of vegetable oils, hydrogenated vegetable oils, and triglycerides.

[1374] In an embodiment, the composition may include a solubilizer to ensure good solubilization and/or dissolution of the compound of the present invention and to minimize precipitation of the compound of the present invention. This can be especially important for compositions for non-oral use—e.g., compositions for injection. A solubilizer may also be added to increase the solubility of the hydrophilic drug and/or other components, such as surfactants, or to maintain the composition as a stable or homogeneous solution or dispersion.

[1375] Examples of suitable solubilizers include, but are not limited to, the following: alcohols and polyols, such as ethanol, isopropanol, butanol, benzyl alcohol, ethylene glycol, propylene glycol, butanediols and isomers thereof, glycerol, pentaerythritol, sorbitol, mannitol, transcutol, dimethyl isosorbide, polyethylene glycol, polypropylene glycol, polyvinylalcohol, hydroxypropyl methylcellulose and other cellulose derivatives, cyclodextrins and cyclodextrin derivatives; ethers of polyethylene glycols having an average molecular weight of about 200 to about 6000, such as tetrahydrofurfuryl alcohol PEG ether (glycofurol) or methoxy PEG; amides and other nitrogen-containing compounds such as 2-pyrrolidone, 2-piperidone, ε-caprolactam, N-alkylpyrrolidone, N-hydroxyalkylpyrrolidone, N-alkylpiperidone, N-alkylcaprolactam, dimethylacetamide and polyvinylpyrrolidone; esters such as ethyl propionate, tributylcitrate, acetyl triethylcitrate, acetyl tributyl citrate, triethylcitrate, ethyl oleate, ethyl caprylate, ethyl butyrate, triacetin, propylene glycol monoacetate, propylene glycol diacetate, .epsilon.-caprolactone and isomers thereof, δ-valerolactone and isomers thereof, β-butyrolactone and isomers thereof; and other solubilizers known in the art, such as dimethyl acetamide, dimethyl isosorbide, N-methyl pyrrolidones, monooctanoin, diethylene glycol monoethyl ether, and water.

[1376] Mixtures of solubilizers may also be used. Examples include, but not limited to, triacetin, triethylcitrate, ethyl oleate, ethyl caprylate, dimethylacetamide, N-methylpyrrolidone, N-hydroxyethylpyrrolidone, polyvinylpyrrolidone, hydroxypropyl methylcellulose, hydroxypropyl cyclodextrins, ethanol, polyethylene glycol 200-100, glycofurol, transcutol, propylene glycol, and dimethyl isosorbide. Particularly preferred solubilizers include sorbitol, glycerol, triacetin, ethyl alcohol, PEG-400, glycofurol and propylene glycol.

[1377] The amount of solubilizer that can be included is not particularly limited. The amount of a given solubilizer may be limited to a bioacceptable amount, which may be readily determined by one of skill in the art. In some circumstances, it may be advantageous to include amounts of solubilizers far in excess of bioacceptable amounts, for example to maximize the concentration of the drug, with excess solubilizer removed prior to providing the composition to a patient using conventional techniques, such as distillation or evaporation. Thus, if present, the solubilizer can be in a weight ratio of 10%, 25%, 50%, 100%, or up to about 200% by weight, based on the combined weight of the drug, and other excipients. If desired, very small amounts of solubilizer may also be used, such as 5%, 2%, 1% or even less. Typically, the solubilizer may be present in an amount of about 1% to about 100%, more typically about 5% to about 25% by weight.

[1378] The composition can further include one or more pharmaceutically acceptable additives and excipients. Such additives and excipients include, without limitation, detackifiers, anti-foaming agents, buffering agents, polymers, antioxidants, preservatives, chelating agents, viscomodulators, tonicifiers, flavorants, colorants, odorants, opacifiers, suspending agents, binders, fillers, plasticizers, lubricants, and mixtures thereof.

[1379] In addition, an acid or a base may be incorporated into the composition to facilitate processing, to enhance stability, or for other reasons. Examples of pharmaceutically acceptable bases include amino acids, amino acid esters, ammonium hydroxide, potassium hydroxide, sodium hydroxide, sodium hydrogen carbonate, aluminum hydroxide, calcium carbonate, magnesium hydroxide, magnesium aluminum silicate, synthetic aluminum silicate, synthetic hydrocalcite, magnesium aluminum hydroxide, diisopropylethylamine, ethanolamine, ethylenediamine, triethanolamine, triethylamine, triisopropanolamine, trimethylamine, tris(hydroxymethyl)aminomethane (TRIS) and the like. Also suitable are bases that are salts of a pharmaceutically acceptable acid, such as acetic acid, acrylic acid, adipic acid, alginic acid, alkanesulfonic acid, amino acids, ascorbic acid, benzoic acid, boric acid, butyric acid, carbonic acid, citric acid, fatty acids, formic acid, fumaric acid, gluconic acid, hydroquinosulfonic acid, isoascorbic acid, lactic acid, maleic acid, oxalic acid, para-bromophenylsulfonic acid, propionic acid, p-toluenesulfonic acid, salicylic acid, stearic acid, succinic acid, tannic acid, tartaric acid, thioglycolic acid, toluenesulfonic acid, uric acid, and the like. Salts of polyprotic acids, such as sodium phosphate, disodium hydrogen phosphate, and sodium dihydrogen phosphate can also be used. When the base is a salt, the cation can be any convenient and pharmaceutically acceptable cation, such as ammonium, alkali metals and alkaline earth metals. Example may include, but not limited to, sodium, potassium, lithium, magnesium, calcium and ammonium.

[1380] Suitable acids are pharmaceutically acceptable organic or inorganic acids. Examples of suitable inorganic acids include hydrochloric acid, hydrobromic acid, hydriodic acid, sulfuric acid, nitric acid, boric acid, phosphoric acid, and the like. Examples of suitable organic acids include acetic acid, acrylic acid, adipic acid, alginic acid, alkanesulfonic acids, amino acids, ascorbic acid, benzoic acid, boric acid, butyric acid, carbonic acid, citric acid, fatty acids, formic acid, fumaric acid, gluconic acid, hydroquinosulfonic acid, isoascorbic acid, lactic acid, maleic acid, methanesulfonic acid, oxalic acid, para-bromophenylsulfonic acid, propionic acid, p-toluenesulfonic acid, salicylic acid, stearic acid, succinic acid, tannic acid, tartaric acid, thioglycolic acid, toluenesulfonic acid and uric acid.

### Pharmaceutical Compositions for Injection

[1381] In preferred embodiments, the invention provides a pharmaceutical composition for injection containing the combination of a BTK inhibitor and a molecule selected from the group consisting of a GITR binding molecule, a 4-1BB agonist, an OX40 agonist, and combinations thereof, and a pharmaceutical excipient suitable for injection. Components and amounts of agents in the compositions are as described herein.

[1382] The forms in which the compositions of the present invention may be incorporated for administration by injection include aqueous or oil suspensions, or emulsions, with sesame oil, corn oil, cottonseed oil, or peanut oil, as well as elixirs, mannitol, dextrose, or a sterile aqueous solution, and similar pharmaceutical vehicles.

[1383] Aqueous solutions in saline are also conventionally used for injection. Ethanol, glycerol, propylene glycol and liquid polyethylene glycol (and suitable mixtures thereof), cyclodextrin derivatives, and vegetable oils may also be employed. The proper fluidity can be maintained, for example, by the use of a coating, such as lecithin, for the maintenance of the required particle size in the case of dispersion and by the use of surfactants. The prevention of the action of microorganisms can be brought about by various antibacterial and antifungal agents, for example, parabens, chlorobutanol, phenol, sorbic acid and thimerosal.

[1384] Sterile injectable solutions are prepared by incorporating the combination of the GITR binding molecules and BTK inhibitors in the required amounts in the appropriate solvent with various other ingredients as enumerated above, as required, followed by filtered sterilization. Generally, dispersions are prepared by incorporating the various sterilized active ingredients into a sterile vehicle which contains the basic dispersion medium and the required other ingredients from those enumerated above. In the case of sterile powders for the preparation of sterile injectable solutions, certain desirable methods of preparation are vacuum-drying and freeze-drying techniques which yield a powder of the active ingredient plus any additional desired ingredient from a previously sterile-filtered solution thereof.

### Pharmaceutical Compositions for Topical Delivery

[1385] In preferred embodiments, the invention provides a pharmaceutical composition for transdermal delivery containing the combination of a BTK inhibitor and a molecule selected from the group consisting of a GITR binding molecule, a 4-1BB agonist, an OX40 agonist, and combinations thereof, and a pharmaceutical excipient suitable for transdermal delivery.

[1386] Compositions of the present invention can be formulated into preparations in solid, semi-solid, or liquid forms suitable for local or topical administration, such as gels, water soluble jellies, creams, lotions, suspensions, foams, powders, slurries, ointments, solutions, oils, pastes, suppositories, sprays, emulsions, saline solutions, dimethylsulfoxide (DMSO)-based solutions. In general, carriers with higher densities are capable of providing an area with a prolonged exposure to the active ingredients. In contrast, a solution formulation may provide more immediate exposure of the active ingredient to the chosen area.

[1387] The pharmaceutical compositions also may comprise suitable solid or gel phase carriers or excipients, which are compounds that allow increased penetration of, or assist in the delivery of, therapeutic molecules across the stratum corneum permeability barrier of the skin. There are many of these penetration-enhancing molecules known to those trained in the art of topical formulation. Examples of such carriers and excipients include, but are not limited to, humectants (e.g., urea), glycols (e.g., propylene glycol), alcohols (e.g., ethanol), fatty acids (e.g., oleic acid), surfactants (e.g., isopropyl myristate and sodium lauryl sulfate), pyrrolidones, glycerol monolaurate, sulfoxides, terpenes (e.g., menthol), amines, amides, alkanes, alkanols, water, calcium carbonate, calcium phosphate, various sugars, starches, cellulose derivatives, gelatin, and polymers such as polyethylene glycols.

[1388] Another exemplary formulation for use in the methods of the present invention employs transdermal delivery devices (“patches”). Such transdermal patches may be used to provide continuous or discontinuous infusion of the combination of the GITR binding molecules and BTK inhibitors in controlled amounts, either with or without another active pharmaceutical ingredient.

[1389] The construction and use of transdermal patches for the delivery of pharmaceutical agents is well known in the art. See, e.g., U.S. Pat. Nos. 5,023,252; 4,992,445 and 5,001,139. Such patches may be constructed for continuous, pulsatile, or on demand delivery of pharmaceutical agents.

### Pharmaceutical Compositions for Inhalation

[1390] Compositions for inhalation or insufflation include solutions and suspensions in pharmaceutically acceptable, aqueous or organic solvents, or mixtures thereof, and powders. The liquid or solid compositions may contain suitable pharmaceutically acceptable excipients as described supra. Preferably the compositions are administered by the oral or nasal respiratory route for local or systemic effect. Compositions in preferably pharmaceutically acceptable solvents may be nebulized by use of inert gases. Nebulized solutions may be inhaled directly from the nebulizing device or the nebulizing device may be attached to a face mask tent, or intermittent positive pressure breathing machine. Solution, suspension, or powder compositions may be administered, preferably orally or nasally, from devices that deliver the formulation in an appropriate manner. Dry powder inhalers may also be used to provide inhaled delivery of the compositions.

### Other Pharmaceutical Compositions

[1391] Pharmaceutical compositions may also be prepared from compositions described herein and one or more pharmaceutically acceptable excipients suitable for sublingual, buccal, rectal, intraosseous, intraocular, intranasal, epidural, or intraspinal administration. Preparations for such pharmaceutical compositions are well-known in the art. See, e.g., Anderson, Philip O.; Knoben, James E.; Troutman, William G, eds., Handbook of Clinical Drug Data, Tenth Edition, McGraw-Hill, 2002; and Pratt and Taylor, eds., Principles of Drug Action, Third Edition, Churchill Livingston, N.Y., 1990, each of which is incorporated by reference herein in its entirety.

[1392] Administration of a combination of a BTK inhibitor and a molecule selected from the group consisting of a GITR binding molecule, a 4-1BB agonist, an OX40 agonist, and combinations thereof or pharmaceutical composition of these compounds can be effected by any method that enables delivery of the compounds to the site of action. These methods include oral routes, intraduodenal routes, parenteral injection (including intravenous, intraarterial, subcutaneous, intramuscular, intravascular, intraperitoneal or infusion), topical (e.g., transdermal application), rectal administration, via local delivery by catheter or stent or through inhalation. The combination of compounds can also be administered intraadiposally or intrathecally.

[1393] The compositions of the invention may also be delivered via an impregnated or coated device such as a stent, for example, or an artery-inserted cylindrical polymer. Such a method of administration may, for example, aid in the prevention or amelioration of restenosis following procedures such as balloon angioplasty. Without being bound by theory, compounds of the invention may slow or inhibit the migration and proliferation of smooth muscle cells in the arterial wall which contribute to restenosis. A compound of the invention may be administered, for example, by local delivery from the struts of a stent, from a stent graft, from grafts, or from the cover or sheath of a stent. In some embodiments, a compound of the invention is admixed with a matrix. Such a matrix may be a polymeric matrix, and may serve to bond the compound to the stent. Polymeric matrices suitable for such use, include, for example, lactone-based polyesters or copolyesters such as polylactide, polycaprolactonglycolide, polyorthoesters, polyanhydrides, polyaminoacids, polysaccharides, polyphosphazenes, poly(ether-ester) copolymers (e.g. PEO-PLLA); polydimethylsiloxane, poly(ethylene-vinylacetate), acrylate-based polymers or copolymers (e.g., polyhydroxyethyl methylmethacrylate, polyvinyl pyrrolidinone), fluorinated polymers such as polytetrafluoroethylene and cellulose esters. Suitable matrices may be nondegrading or may degrade with time, releasing the compound or compounds. The combination of the GITR binding molecules and BTK inhibitors may be applied to the surface of the stent by various methods such as dip/spin coating, spray coating, dip-coating, and/or brush-coating. The compounds may be applied in a solvent and the solvent may be allowed to evaporate, thus forming a layer of compound onto the stent. Alternatively, the compound may be located in the body of the stent or graft, for example in microchannels or micropores. When implanted, the compound diffuses out of the body of the stent to contact the arterial wall. Such stents may be prepared by dipping a stent manufactured to contain such micropores or microchannels into a solution of the compound of the invention in a suitable solvent, followed by evaporation of the solvent. Excess drug on the surface of the stent may be removed via an additional brief solvent wash. In yet other embodiments, compounds of the invention may be covalently linked to a stent or graft. A covalent linker may be used which degrades in vivo, leading to the release of the compound of the invention. Any bio-labile linkage may be used for such a purpose, such as ester, amide or anhydride linkages. The combination of the GITR binding molecules and BTK inhibitors may additionally be administered intravascularly from a balloon used during angioplasty. Extravascular administration of the combination of the GITR binding molecules and BTK inhibitors via the pericard or via advential application of formulations of the invention may also be performed to decrease restenosis.

[1394] Exemplary parenteral administration forms include solutions or suspensions of active compound in sterile aqueous solutions, for example, aqueous propylene glycol or dextrose solutions. Such dosage forms can be suitably buffered, if desired.

[1395] The invention also provides kits. The kits include a combination of a BTK inhibitor and a molecule selected from the group consisting of a GITR binding molecule, a 4-1BB agonist, an OX40 agonist, and combinations thereof, either alone or in combination in suitable packaging, and written material that can include instructions for use, discussion of clinical studies and listing of side effects. Such kits may also include information, such as scientific literature references, package insert materials, clinical trial results, and/or summaries of these and the like, which indicate or establish the activities and/or advantages of the composition, and/or which describe dosing, administration, side effects, drug interactions, or other information useful to the health care provider. Such information may be based on the results of various studies, for example, studies using experimental animals involving in vivo models and studies based on human clinical trials. The kit may further contain another active pharmaceutical ingredient. In selected embodiments, the GITR binding molecules and BTK inhibitors and another active pharmaceutical ingredient are provided as separate compositions in separate containers within the kit. In selected embodiments, the molecule selected from the group consisting of a GITR binding molecule, a 4-1BB agonist, an OX40 agonist, and combinations thereof and the BTK inhibitor and the agent are provided as a single composition within a container in the kit. Suitable packaging and additional articles for use (e.g., measuring cup for liquid preparations, foil wrapping to minimize exposure to air, and the like) are known in the art and may be included in the kit. Kits described herein can be provided, marketed and/or promoted to health providers, including physicians, nurses, pharmacists, formulary officials, and the like. Kits may also, in selected embodiments, be marketed directly to the consumer.

[1396] In some embodiments, the invention provides a kit comprising (1) a composition comprising a therapeutically effective amount of a molecule selected from the group consisting of a GITR binding molecule, a 4-1BB agonist, an OX40 agonist, and combinations thereof or fragments, derivatives, conjugates, variants, biosimilars, and combinations thereof, and (2) a composition comprising a therapeutically effective amount of a BTK inhibitor or a pharmaceutically acceptable salt, solvate, hydrate, cocrystal, or prodrug thereof. These compositions are typically pharmaceutical compositions. The kit is for co-administration of the molecule selected from the group consisting of a GITR binding molecule, a 4-1BB agonist, an OX40 agonist, and combinations thereof and the BTK inhibitors, either simultaneously or separately.

[1397] In some embodiments, the invention provides a kit comprising (1) a composition comprising a therapeutically effective amount of a molecule selected from the group consisting of a GITR binding molecule, a 4-1BB agonist, an OX40 agonist, and combinations thereof or fragments, derivatives, conjugates, variants, biosimilars, and combinations thereof; (2) a composition comprising a therapeutically effective amount of a BTK inhibitor or a pharmaceutically acceptable salt, solvate, hydrate, cocrystal, or prodrug thereof; and/or (3) a composition comprising a therapeutically effective amount of an anti-CD20 antibody selected from the group consisting of rituximab, obinutuzumab, ofatumumab, veltuzumab, tositumomab, ibritumomab, and fragments, derivatives, conjugates, variants, radioisotope-labeled complexes, and biosimilars thereof. These compositions are typically pharmaceutical compositions. The kit is for co-administration of the molecule selected from the group consisting of a GITR binding molecule, a 4-1BB agonist, an OX40 agonist, and combinations thereof, the BTK inhibitor, and/or the anti-CD20 antibody, either simultaneously or separately.

[1398] In some embodiments, the invention provides a kit comprising (1) a composition comprising a therapeutically effective amount of a molecule selected from the group consisting of a GITR binding molecule, a 4-1BB agonist, an OX40 agonist, and combinations thereof or fragments, derivatives, conjugates, variants, biosimilars, and combinations thereof; (2) a composition comprising a therapeutically effective amount of a BTK inhibitor or a pharmaceutically acceptable salt, solvate, hydrate, cocrystal, or prodrug thereof; and/or (3) a composition comprising a therapeutically effective amount of albumin-bound paclitaxel, bendamustine, fludarabine, cyclophosphamide, chlorambucil, an anticoagulant or antiplatelet active pharmaceutical ingredient, or combinations thereof. These compositions are typically pharmaceutical compositions. The kit is for co-administration of the molecule selected from the group consisting of a GITR binding molecule, a 4-1BB agonist, an OX40 agonist, and combinations thereof, BTK inhibitor, albumin-bound paclitaxel, bendamustine, fludarabine, cyclophosphamide, chlorambucil, and/or the anticoagulant or the antiplatelet active pharmaceutical ingredient, either simultaneously or separately.

[1399] In some embodiments, the invention provides a kit comprising (1) a composition comprising a therapeutically effective amount of a molecule selected from the group consisting of a GITR binding molecule, a 4-1BB agonist, an OX40 agonist, and combinations thereof or fragments, derivatives, conjugates, variants, biosimilars, and combinations thereof; (2) a composition comprising a therapeutically effective amount of a BTK inhibitor or a pharmaceutically acceptable salt, solvate, hydrate, cocrystal, or prodrug thereof; (3) a composition comprising a therapeutically effective amount of an anti-CD20 antibody selected from the group consisting of rituximab, obinutuzumab, ofatumumab, veltuzumab, tositumomab, ibritumomab, and fragments, derivatives, conjugates, variants, radioisotope-labeled complexes, biosimilars thereof, and combinations thereof; and/or (4) a composition comprising a therapeutically effective amount of albumin-bound paclitaxel, bendamustine, fludarabine, cyclophosphamide, chlorambucil, an anticoagulant or antiplatelet active pharmaceutical ingredient, or combinations thereof. These compositions are typically pharmaceutical compositions. The kit is for co-administration of the molecule selected from the group consisting of a GITR binding molecule, a 4-1BB agonist, an OX40 agonist, and combinations thereof, the BTK inhibitor, the anti-CD20 antibody, albumin-bound paclitaxel, bendamustine, fludarabine, cyclophosphamide, chlorambucil, and/or the anticoagulant or the antiplatelet active pharmaceutical ingredient, either simultaneously or separately.

[1400] The kits described above are preferably for use in the treatment of the diseases and conditions described herein. In a preferred embodiment, the kits are for use in the treatment of cancer. In preferred embodiments, the kits are for use in treating solid tumor cancers, lymphomas and leukemias.

[1401] In a preferred embodiment, the kits of the present invention are for use in the treatment of cancer. In a preferred embodiment, the kits of the present invention are for use in the treatment of a cancer selected from the group consisting of bladder cancer, squamous cell carcinoma including head and neck cancer, pancreatic ductal adenocarcinoma (PDA), pancreatic cancer, colon carcinoma, mammary carcinoma, breast cancer, fibrosarcoma, mesothelioma, renal cell carcinoma, lung carcinoma, thyoma, prostate cancer, colorectal cancer, ovarian cancer, acute myeloid leukemia, thymus cancer, brain cancer, squamous cell cancer, skin cancer, eye cancer, retinoblastoma, melanoma, intraocular melanoma, oral cavity and oropharyngeal cancers, gastric cancer, stomach cancer, cervical cancer, renal cancer, kidney cancer, liver cancer, ovarian cancer, esophageal cancer, testicular cancer, gynecological cancer, thyroid cancer, acquired immune deficiency syndrome (AIDS)-related cancers (e.g., lymphoma and Kaposi's sarcoma), viral-induced cancer, glioblastoma, esophogeal tumors, hematological neoplasms, non-small-cell lung cancer, chronic myelocytic leukemia, diffuse large B-cell lymphoma, esophagus tumor, follicle center lymphoma, head and neck tumor, hepatitis C virus infection, hepatocellular carcinoma, Hodgkin's disease, metastatic colon cancer, multiple myeloma, non-Hodgkin's lymphoma, indolent non-Hodgkin's lymphoma, ovary tumor, pancreas tumor, renal cell carcinoma, small-cell lung cancer, stage IV melanoma, chronic lymphocytic leukemia, B-cell acute lymphoblastic leukemia (ALL), mature B-cell ALL, follicular lymphoma, mantle cell lymphoma, and Burkitt's lymphoma.

### Dosages and Dosing Regimens

[1402] The amounts of BTK inhibitors and the molecule selected from the group consisting of a GITR binding molecule, a 4-1BB agonist, an OX40 agonist, and combinations thereof administered will be dependent on the human or mammal being treated, the severity of the disorder or condition, the rate of administration, the disposition of the compounds and the discretion of the prescribing physician. However, an effective dosage of each is in the range of about 0.001 to about 100 mg per kg body weight per day, such as about 1 to about 35 mg/kg/day, in single or divided doses. For a 70 kg human, this would amount to about 0.05 to 7 g/day, such as about 0.05 to about 2.5 g/day. In some instances, dosage levels below the lower limit of the aforesaid range may be more than adequate, while in other cases still larger doses may be employed without causing any harmful side effect—e.g., by dividing such larger doses into several small doses for administration throughout the day. The dosage of BTK inhibitors and the molecule selected from the group consisting of a GITR binding molecule, a 4-1BB agonist, an OX40 agonist, and combinations thereof may be provided in units of mg/kg of body mass or in mg/m² of body surface area. In an embodiment, the ratio of the dose of the molecule selected from the group consisting of a GITR binding molecule, a 4-1BB agonist, an OX40 agonist, and combinations thereof to the dose of the BTK inhibitor in mg/kg or in mg/m² is in the range from 10:1 to 1:10, preferably from 2.5:1 to 1:2.5, and more preferably about 1:1. In an embodiment, the ratio of the molecule selected from the group consisting of a GITR binding molecule, a 4-1BB agonist, an OX40 agonist, and combinations thereof to the BTK inhibitor in mg/kg or in mg/m² is selected from the group consisting of about 20:1, about 19:1, about 18:1, about 17:1, about 16:1, about 15:1, about 14:1, about 13:1, about 12:1, about 11:1, about 10:1, about 9:1, about 8:1, about 7:1, about 6:1, about 5:1, about 4:1, about 3:1, about 2:1, about 1:1, about 1:2, about 1:3, about 1:4, about 1:5, about 1:6, about 1:7, about 1:8, about 1:9, about 1:10, about 1:11, about 1:12, about 1:13, about 1:14, about 1:15, about 1:16, about 1:17, about 1:18, about 1:19, and about 1:20.

[1403] In some embodiments, the combination of a BTK inhibitor and a molecule selected from the group consisting of a GITR binding molecule, a 4-1BB agonist, an OX40 agonist, and combinations thereof is administered in a single dose. Such administration may be by injection, e.g., intravenous injection, in order to introduce the molecule selected from the group consisting of a GITR binding molecule, a 4-1BB agonist, an OX40 agonist, and combinations thereof and BTK inhibitor quickly. However, other routes, including the preferred oral route, may be used as appropriate. A single dose of the combination of a BTK inhibitor and a molecule selected from the group consisting of a GITR binding molecule, a 4-1BB agonist, an OX40 agonist, and combinations thereof may also be used for treatment of an acute condition.

[1404] In some embodiments, the combination of a BTK inhibitor and a molecule selected from the group consisting of a GITR binding molecule, a 4-1BB agonist, an OX40 agonist, and combinations thereof is administered in multiple doses. In a preferred embodiment, the combination of a BTK inhibitor and a molecule selected from the group consisting of a GITR binding molecule, a 4-1BB agonist, an OX40 agonist, and combinations thereof is administered in multiple doses. Dosing may be once, twice, three times, four times, five times, six times, or more than six times per day. Dosing may be once a month, once every two weeks, once a week, or once every other day. In other embodiments, the combination of a BTK inhibitor and a molecule selected from the group consisting of a GITR binding molecule, a 4-1BB agonist, an OX40 agonist, and combinations thereof is administered about once per day to about 6 times per day. In some embodiments, the combination of a BTK inhibitor and a molecule selected from the group consisting of a GITR binding molecule, a 4-1BB agonist, an OX40 agonist, and combinations thereof is administered once daily, while in other embodiments, the combination of a BTK inhibitor and a molecule selected from the group consisting of a GITR binding molecule, a 4-1BB agonist, an OX40 agonist, and combinations thereof is administered twice daily, and in other embodiments the combination of a BTK inhibitor and a molecule selected from the group consisting of a GITR binding molecule, a 4-1BB agonist, an OX40 agonist, and combinations thereof is administered three times daily.

[1405] Administration of the active pharmaceutical ingredients of the invention may continue as long as necessary. In selected embodiments, the combination of a BTK inhibitor and a molecule selected from the group consisting of a GITR binding molecule, a 4-1BB agonist, an OX40 agonist, and combinations thereof is administered for more than 1, 2, 3, 4, 5, 6, 7, 14, or 28 days. In some embodiments, the combination of a BTK inhibitor and a molecule selected from the group consisting of a GITR binding molecule, a 4-1BB agonist, an OX40 agonist, and combinations thereof is administered for less than 28, 14, 7, 6, 5, 4, 3, 2, or 1 day. In selected embodiments, the combination of a BTK inhibitor and a molecule selected from the group consisting of a GITR binding molecule, a 4-1BB agonist, an OX40 agonist, and combinations thereof is administered chronically on an ongoing basis—e.g., for the treatment of chronic effects. In another embodiment the administration of the combination of a BTK inhibitor and a molecule selected from the group consisting of a GITR binding molecule, a 4-1BB agonist, an OX40 agonist, and combinations thereof continues for less than about 7 days. In yet another embodiment the administration continues for more than about 6, 10, 14, 28 days, two months, six months, or one year. In some cases, continuous dosing is achieved and maintained as long as necessary.

[1406] In some embodiments, an effective dosage of a BTK inhibitor disclosed herein is in the range of about 1 mg to about 500 mg, about 10 mg to about 300 mg, about 20 mg to about 250 mg, about 25 mg to about 200 mg, about 10 mg to about 200 mg, about 20 mg to about 150 mg, about 30 mg to about 120 mg, about 10 mg to about 90 mg, about 20 mg to about 80 mg, about 30 mg to about 70 mg, about 40 mg to about 60 mg, about 45 mg to about 55 mg, about 48 mg to about 52 mg, about 50 mg to about 150 mg, about 60 mg to about 140 mg, about 70 mg to about 130 mg, about 80 mg to about 120 mg, about 90 mg to about 110 mg, about 95 mg to about 105 mg, about 150 mg to about 250 mg, about 160 mg to about 240 mg, about 170 mg to about 230 mg, about 180 mg to about 220 mg, about 190 mg to about 210 mg, about 195 mg to about 205 mg, or about 198 to about 202 mg. In some embodiments, an effective dosage of a BTK inhibitor disclosed herein is about 25 mg, about 50 mg, about 75 mg, about 100 mg, about 125 mg, about 150 mg, about 175 mg, about 200 mg, about 225 mg, or about 250 mg.

[1407] In some embodiments, an effective dosage of a BTK inhibitor disclosed herein is in the range of about 0.01 mg/kg to about 4.3 mg/kg, about 0.15 mg/kg to about 3.6 mg/kg, about 0.3 mg/kg to about 3.2 mg/kg, about 0.35 mg/kg to about 2.85 mg/kg, about 0.15 mg/kg to about 2.85 mg/kg, about 0.3 mg to about 2.15 mg/kg, about 0.45 mg/kg to about 1.7 mg/kg, about 0.15 mg/kg to about 1.3 mg/kg, about 0.3 mg/kg to about 1.15 mg/kg, about 0.45 mg/kg to about 1 mg/kg, about 0.55 mg/kg to about 0.85 mg/kg, about 0.65 mg/kg to about 0.8 mg/kg, about 0.7 mg/kg to about 0.75 mg/kg, about 0.7 mg/kg to about 2.15 mg/kg, about 0.85 mg/kg to about 2 mg/kg, about 1 mg/kg to about 1.85 mg/kg, about 1.15 mg/kg to about 1.7 mg/kg, about 1.3 mg/kg mg to about 1.6 mg/kg, about 1.35 mg/kg to about 1.5 mg/kg, about 2.15 mg/kg to about 3.6 mg/kg, about 2.3 mg/kg to about 3.4 mg/kg, about 2.4 mg/kg to about 3.3 mg/kg, about 2.6 mg/kg to about 3.15 mg/kg, about 2.7 mg/kg to about 3 mg/kg, about 2.8 mg/kg to about 3 mg/kg, or about 2.85 mg/kg to about 2.95 mg/kg. In some embodiments, an effective dosage of a BTK inhibitor disclosed herein is about 0.35 mg/kg, about 0.7 mg/kg, about 1 mg/kg, about 1.4 mg/kg, about 1.8 mg/kg, about 2.1 mg/kg, about 2.5 mg/kg, about 2.85 mg/kg, about 3.2 mg/kg, or about 3.6 mg/kg.

[1408] In some embodiments, an effective dosage of a molecule selected from the group consisting of a GITR binding molecule, a 4-1BB agonist, an OX40 agonist, and combinations thereof disclosed herein is in the range of about 1 mg to about 500 mg, about 10 mg to about 300 mg, about 20 mg to about 250 mg, about 25 mg to about 200 mg, about 1 mg to about 50 mg, about 5 mg to about 45 mg, about 10 mg to about 40 mg, about 15 mg to about 35 mg, about 20 mg to about 30 mg, about 23 mg to about 28 mg, about 50 mg to about 150 mg, about 60 mg to about 140 mg, about 70 mg to about 130 mg, about 80 mg to about 120 mg, about 90 mg to about 110 mg, or about 95 mg to about 105 mg, about 98 mg to about 102 mg, about 150 mg to about 250 mg, about 160 mg to about 240 mg, about 170 mg to about 230 mg, about 180 mg to about 220 mg, about 190 mg to about 210 mg, about 195 mg to about 205 mg, or about 198 to about 207 mg. In some embodiments, an effective dosage of a GITR binding molecule disclosed herein is about 25 mg, about 50 mg, about 75 mg, about 100 mg, about 125 mg, about 150 mg, about 175 mg, about 200 mg, about 225 mg, or about 250 mg.

[1409] In some embodiments, an effective dosage of a molecule selected from the group consisting of a GITR binding molecule, a 4-1BB agonist, an OX40 agonist, and combinations thereof disclosed herein is in the range of about 0.01 mg/kg to about 4.3 mg/kg, about 0.15 mg/kg to about 3.6 mg/kg, about 0.3 mg/kg to about 3.2 mg/kg, about 0.35 mg/kg to about 2.85 mg/kg, about 0.01 mg/kg to about 0.7 mg/kg, about 0.07 mg/kg to about 0.65 mg/kg, about 0.15 mg/kg to about 0.6 mg/kg, about 0.2 mg/kg to about 0.5 mg/kg, about 0.3 mg/kg to about 0.45 mg/kg, about 0.3 mg/kg to about 0.4 mg/kg, about 0.7 mg/kg to about 2.15 mg/kg, about 0.85 mg/kg to about 2 mg/kg, about 1 mg/kg to about 1.85 mg/kg, about 1.15 mg/kg to about 1.7 mg/kg, about 1.3 mg/kg to about 1.6 mg/kg, about 1.35 mg/kg to about 1.5 mg/kg, about 1.4 mg/kg to about 1.45 mg/kg, about 2.15 mg/kg to about 3.6 mg/kg, about 2.3 mg/kg to about 3.4 mg/kg, about 2.4 mg/kg to about 3.3 mg/kg, about 2.6 mg/kg to about 3.15 mg/kg, about 2.7 mg/kg to about 3 mg/kg, about 2.8 mg/kg to about 3 mg/kg, or about 2.85 mg/kg to about 2.95 mg/kg. In some embodiments, an effective dosage of a GITR binding molecule disclosed herein is about 0.4 mg/kg, about 0.7 mg/kg, about 1 mg/kg, about 1.4 mg/kg, about 1.8 mg/kg, about 2.1 mg/kg, about 2.5 mg/kg, about 2.85 mg/kg, about 3.2 mg/kg, or about 3.6 mg/kg.

[1410] In some embodiments, a combination of a BTK inhibitor and a molecule selected from the group consisting of a GITR binding molecule, a 4-1BB agonist, an OX40 agonist, and combinations thereof is administered at a dosage of 10 to 200 mg BID, including 10, 20, 30, 40, 50, 60, 70, 80, 90, 100, 150, or 200 mg BID, for the BTK inhibitor, and 10 to 200 mg BID, including 25, 50, 75, 100, 150, or 200 mg BID for the molecule selected from the group consisting of a GITR binding molecule, a 4-1BB agonist, an OX40 agonist, and combinations thereof.

[1411] In some embodiments, a combination of a BTK inhibitor and a molecule selected from the group consisting of a GITR binding molecule, a 4-1BB agonist, an OX40 agonist, and combinations thereof is administered at a dosage of 10 to 200 mg BID, including 10, 20, 30, 40, 50, 60, 70, 80, 90, 100, or 150 mg BID, for the BTK inhibitor, and 1 to 500 mg BID, including 1, 5, 10, 15, 25, 50, 75, 100, 150, 200, 300, 400, or 500 mg BID for the molecule selected from the group consisting of a GITR binding molecule, a 4-1BB agonist, an OX40 agonist, and combinations thereof.

[1412] In some instances, dosage levels below the lower limit of the aforesaid ranges may be more than adequate, while in other cases still larger doses may be employed without causing any harmful side effect—e.g., by dividing such larger doses into several small doses for administration throughout the day.

[1413] An effective amount of the combination of a BTK inhibitor and a molecule selected from the group consisting of a GITR binding molecule, a 4-1BB agonist, an OX40 agonist, and combinations thereof may be administered in either single or multiple doses by any of the accepted modes of administration of agents having similar utilities, including rectal, buccal, intranasal and transdermal routes, by intra-arterial injection, intravenously, intraperitoneally, parenterally, intramuscularly, subcutaneously, orally, topically, or as an inhalant.

### Methods of Treating Solid Tumor Cancers, Hematological Malignancies, Inflammation, Immune and Autoimmune Disorders, and Other Diseases

[1414] The compositions and combinations of inhibitors described above can be used in a method for treating BTK-mediated disorders and diseases. In a preferred embodiment, they are for use in treating hyperproliferative disorders. They may also be used in treating other disorders as described herein and in the following paragraphs.

[1415] In some embodiments, the invention provides a method of treating a hyperproliferative disorder in a mammal that comprises administering to said mammal a therapeutically effective amount of a molecule selected from the group consisting of a GITR binding molecule, a 4-1BB agonist, an OX40 agonist, and combinations thereof and a BTK inhibitor, or a pharmaceutically acceptable salt, solvate, hydrate, cocrystal, or prodrug of either or both the molecule selected from the group consisting of a GITR binding molecule, a 4-1BB agonist, an OX40 agonist, and combinations thereof or the BTK inhibitor.

[1416] In some embodiments, the invention provides a method of treating a hyperproliferative disorder in a mammal that comprises administering to said mammal a therapeutically effective amount of a BTK inhibitor, wherein the BTK inhibitor is selected from wherein the BTK inhibitor is selected from the group consisting of Formula (2), Formula (3), Formula (4), Formula (5), Formula (6), and Formula (7), or a pharmaceutically acceptable salt, solvate, hydrate, cocrystal, or prodrug thereof. In some embodiments, the invention provides a method of treating a hyperproliferative disorder in a mammal that comprises administering to said mammal a therapeutically effective amount of a combination of a BTK inhibitor and a molecule selected from the group consisting of a GITR binding molecule, a 4-1BB agonist, an OX40 agonist, and combinations thereof, where the BTK inhibitor is selected from the group consisting of wherein the BTK inhibitor is selected from the group consisting of Formula (2), Formula (3), Formula (4), Formula (5), Formula (6), and Formula (7), or a pharmaceutically acceptable salt, solvate, hydrate, cocrystal, or prodrug of either or both the molecule selected from the group consisting of a GITR binding molecule, a 4-1BB agonist, an OX40 agonist, and combinations thereof or the BTK inhibitor.

[1417] In some embodiments, the hyperproliferative disorder is a solid tumor cancer selected from the group consisting of bladder cancer, squamous cell carcinoma, head and neck cancer, pancreatic ductal adenocarcinoma (PDA), pancreatic cancer, colon carcinoma, mammary carcinoma, breast cancer, fibrosarcoma, mesothelioma, renal cell carcinoma, lung carcinoma, thyoma, prostate cancer, colorectal cancer, ovarian cancer, acute myeloid leukemia, thymus cancer, brain cancer, squamous cell cancer, skin cancer, eye cancer, retinoblastoma, melanoma, intraocular melanoma, oral cavity cancer, oropharyngeal cancer, gastric cancer, stomach cancer, cervical cancer, renal cancer, kidney cancer, liver cancer, ovarian cancer, prostate cancer, colorectal cancer, esophageal cancer, testicular cancer, gynecological cancer, thyroid cancer, acquired immune deficiency syndrome (AIDS)-related cancers (e.g., lymphoma and Kaposi's sarcoma), viral-induced cancers such as cervical carcinoma (human papillomavirus), B-cell lymphoproliferative disease, nasopharyngeal carcinoma (Epstein-Barr virus), Kaposi's sarcoma and primary effusion lymphomas (Kaposi's sarcoma herpesvirus), hepatocellular carcinoma (hepatitis B and hepatitis C viruses), and T-cell leukemias (Human T-cell leukemia virus-1), glioblastoma, esophogeal tumors, head and neck tumor, metastatic colon cancer, head and neck squamous cell carcinoma, ovary tumor, pancreas tumor, renal cell carcinoma, hematological neoplasms, small-cell lung cancer, non-small-cell lung cancer, stage IV melanoma, and glioma.

[1418] In some embodiments, the hyperproliferative disorder is a B cell hematological malignancy selected from the group consisting of chronic lymphocytic leukemia (CLL), small lymphocytic leukemia (SLL), non-Hodgkin's lymphoma (NHL), diffuse large B cell lymphoma (DLBCL), follicular lymphoma (FL), mantle cell lymphoma (MCL), Hodgkin's lymphoma, B cell acute lymphoblastic leukemia (B-ALL), Burkitt's lymphoma, Waldenström's macroglobulinemia (WM), Burkitt's lymphoma, multiple myeloma, myelodysplatic syndromes, or myelofibrosis. In an embodiment, the invention relates to a method of treating a cancer in a mammal, wherein the cancer is chronic myelocytic leukemia, acute myeloid leukemia, DLBCL (including activated B-cell (ABC) and germinal center B-cell (GCB) subtypes), follicle center lymphoma, Hodgkin's disease, multiple myeloma, indolent non-Hodgkin's lymphoma, and mature B-cell ALL.

[1419] In some embodiments, the hyperproliferative disorder is a subtype of CLL. A number of subtypes of CLL have been characterized. CLL is often classified for immunoglobulin heavy-chain variable-region (IgV_{H}) mutational status in leukemic cells. Damle, et al., Blood 1999, 94, 1840-47; Hamblin, et al., Blood 1999, 94, 1848-54. Patients with IgV_{H} mutations generally survive longer than patients without IgV_{H} mutations. ZAP70 expression (positive or negative) is also used to characterize CLL. Rassenti, et al., N. Engl. J. Med. 2004, 351, 893-901. The methylation of ZAP-70 at CpG3 is also used to characterize CLL, for example by pyrosequencing. Claus, et al., J. Clin. Oncol. 2012, 30, 2483-91; Woyach, et al., Blood 2014, 123, 1810-17. CLL is also classified by stage of disease under the Binet or Rai criteria. Binet, et al., Cancer 1977, 40, 855-64; Rai, Han, Hematol. Oncol. Clin. North Am. 1990, 4, 447-56. Other common mutations, such as 11q deletion, 13q deletion, and 17p deletion can be assessed using well-known techniques such as fluorescence in situ hybridization (FISH). In an embodiment, the invention relates to a method of treating a CLL in a human, wherein the CLL is selected from the group consisting of IgV_{H} mutation negative CLL, ZAP-70 positive CLL, ZAP-70 methylated at CpG3 CLL, CD38 positive CLL, chronic lymphocytic leukemia characterized by a 17p13.1 (17p) deletion, and CLL characterized by a 11q22.3 (11q) deletion.

[1420] In some embodiments, the hyperproliferative disorder is a CLL wherein the CLL has undergone a Richter's transformation. Methods of assessing Richter's transformation, which is also known as Richter's syndrome, are described in Jain and O'Brien, Oncology, 2012, 26, 1146-52. Richter's transformation is a subtype of CLL that is observed in 5-10% of patients. It involves the development of aggressive lymphoma from CLL and has a generally poor prognosis.

[1421] In some embodiments, the hyperproliferative disorder is a CLL or SLL in a patient, wherein the patient is sensitive to lymphocytosis. In an embodiment, the invention relates to a method of treating CLL or SLL in a patient, wherein the patient exhibits lymphocytosis caused by a disorder selected from the group consisting of a viral infection, a bacterial infection, a protozoal infection, or a post-splenectomy state. In an embodiment, the viral infection in any of the foregoing embodiments is selected from the group consisting of infectious mononucleosis, hepatitis, and cytomegalovirus. In an embodiment, the bacterial infection in any of the foregoing embodiments is selected from the group consisting of pertussis, tuberculosis, and brucellosis.

[1422] In some embodiments, the hyperproliferative disorder is selected from the group consisting of myeloproliferative disorders (MPDs), myeloproliferative neoplasms, polycythemia vera (PV), essential thrombocythemia (ET), primary myelofibrosis (PMF), myelodysplastic syndrome, chronic myelogenous leukemia (BCR-ABL1-positive), chronic neutrophilic leukemia, chronic eosinophilic leukemia, or mastocytosis.

[1423] In some embodiments, the hyperproliferative disorder is an inflammatory, immune, or autoimmune disorder. In some embodiments, the hyperproliferative disorder is selected from the group consisting of tumor angiogenesis, chronic inflammatory disease, rheumatoid arthritis, atherosclerosis, inflammatory bowel disease, skin diseases such as psoriasis, eczema, and scleroderma, diabetes, diabetic retinopathy, retinopathy of prematurity, age-related macular degeneration, hemangioma, glioma and melanoma, ulcerative colitis, atopic dermatitis, pouchitis, spondylarthritis, uveitis, Behcet's disease, polymyalgia rheumatica, giant-cell arteritis, sarcoidosis, Kawasaki disease, juvenile idiopathic arthritis, hidratenitis suppurativa, Sjögren's syndrome, psoriatic arthritis, juvenile rheumatoid arthritis, ankylosing spondylitis, Crohn's disease, lupus, and lupus nephritis.

[1424] In some embodiments, the hyperproliferative disorder is a disease related to vasculogenesis or angiogenesis in a mammal which can manifest as tumor angiogenesis, chronic inflammatory disease such as rheumatoid arthritis, inflammatory bowel disease, atherosclerosis, skin diseases such as psoriasis, eczema, and scleroderma, diabetes, diabetic retinopathy, retinopathy of prematurity, age-related macular degeneration, hemangioma, glioma, melanoma, Kaposi's sarcoma and ovarian, breast, lung, pancreatic, prostate, colon and epidermoid cancer.

[1425] In some embodiments, provided herein is a method of treating, preventing and/or managing asthma. As used herein, “asthma” encompasses airway constriction regardless of the cause. Common triggers of asthma include, but are not limited to, exposure to an environmental stimulants (e.g., allergens), cold air, warm air, perfume, moist air, exercise or exertion, and emotional stress. Also provided herein is a method of treating, preventing and/or managing one or more symptoms associated with asthma. Examples of the symptoms include, but are not limited to, severe coughing, airway constriction and mucus production.

[1426] Efficacy of the methods, compounds, and combinations of compounds described herein in treating, preventing and/or managing the indicated diseases or disorders can be tested using various animal models known in the art. Efficacy in treating, preventing and/or managing asthma can be assessed using the ova induced asthma model described, for example, in Lee, et al., J. Allergy Clin. Immunol. 2006, 118, 403-9. Efficacy in treating, preventing and/or managing arthritis (e.g., rheumatoid or psoriatic arthritis) can be assessed using the autoimmune animal models described in, for example, Williams, et al., Chem. Biol. 2010, 17, 123-34, WO 2009/088986, WO 2009/088880, and WO 2011/008302. Efficacy in treating, preventing and/or managing psoriasis can be assessed using transgenic or knockout mouse model with targeted mutations in epidermis, vasculature or immune cells, mouse model resulting from spontaneous mutations, and immuno-deficient mouse model with xenotransplantation of human skin or immune cells, all of which are described, for example, in Boehncke, et al., Clinics in Dermatology, 2007, 25, 596-605. Efficacy in treating, preventing and/or managing fibrosis or fibrotic conditions can be assessed using the unilateral ureteral obstruction model of renal fibrosis, which is described, for example, in Chevalier, et al., Kidney International 2009, 75, 1145-1152; the bleomycin induced model of pulmonary fibrosis described in, for example, Moore, et al., Am. J. Physiol. Lung. Cell. Mol. Physiol. 2008, 294, L152-L160; a variety of liver/biliary fibrosis models described in, for example, Chuang, et al., Clin. Liver Dis. 2008, 12, 333-347 and Omenetti, et al., Laboratory Investigation, 2007, 87, 499-514 (biliary duct-ligated model); or any of a number of myelofibrosis mouse models such as described in Varicchio, et al., Expert Rev. Hematol. 2009, 2(3), 315-334. Efficacy in treating, preventing and/or managing scleroderma can be assessed using a mouse model induced by repeated local injections of bleomycin described, for example, in Yamamoto, et al., J. Invest. Dermatol. 1999, 112, 456-462. Efficacy in treating, preventing and/or managing dermatomyositis can be assessed using a myositis mouse model induced by immunization with rabbit myosin as described, for example, in Phyanagi, et al., Arthritis & Rheumatism, 2009, 60(10), 3118-3127. Efficacy in treating, preventing and/or managing lupus can be assessed using various animal models described, for example, in Ghoreishi, et al., Lupus, 2009, 19, 1029-1035; Ohl, et al., J. Biomed. Biotechnol., 2011, Article ID 432595; Xia, et al., Rheumatology, 2011, 50, 2187-2196; Pau, et al., PLoS ONE, 2012, 7(5), e36761; Mustafa, et al., Toxicology, 2011, 290, 156-168; Ichikawa, et al., Arthritis & Rheumatism, 2012, 62(2), 493-503; Rankin, et al., J. Immunology, 2012, 188, 1656-1667. Efficacy in treating, preventing and/or managing Sjögren's syndrome can be assessed using various mouse models described, for example, in Chiorini, et al., J. Autoimmunity, 2009, 33, 190-196. Models for determining efficacy of treatments for pancreatic cancer are described in Herreros-Villanueva, et al., World J. Gastroenterol. 2012, 18, 1286-1294. Models for determining efficacy of treatments for breast cancer are described, e.g., in Fantozzi, Breast Cancer Res. 2006, 8, 212. Models for determining efficacy of treatments for ovarian cancer are described, e.g., in Mullany, et al., Endocrinology 2012, 153, 1585-92; and Fong, et al., J. Ovarian Res. 2009, 2, 12. Models for determining efficacy of treatments for melanoma are described, e.g., in Damsky, et al., Pigment Cell & Melanoma Res. 2010, 23, 853-859. Models for determining efficacy of treatments for lung cancer are described, e.g., in Meuwissen, et al., Genes & Development, 2005, 19, 643-664. Models for determining efficacy of treatments for lung cancer are described, e.g., in Kim, Clin. Exp. Otorhinolaryngol. 2009, 2, 55-60; and Sano, Head Neck Oncol. 2009, 1, 32. Models for determining efficacy of treatments for colorectal cancer, including the CT26 model, are described in Castle, et al., BMC Genomics, 2013, 15, 190; Endo, et al., Cancer Gene Therapy, 2002, 9, 142-148; Roth et al., Adv. Immunol. 1994, 57, 281-351; Fearon, et al., Cancer Res. 1988, 48, 2975-2980.

[1427] In selected embodiments, the invention provides a method of treating a solid tumor cancer with a composition including a combination of a BTK inhibitor and a molecule selected from the group consisting of a GITR binding molecule, a 4-1BB agonist, an OX40 agonist, and combinations thereof, wherein the dose is effective to inhibit signaling between the solid tumor cells and at least one microenvironment selected from the group consisting of macrophages, monocytes, mast cells, helper T cells, cytotoxic T cells, regulatory T cells, natural killer cells, myeloid-derived suppressor cells, regulatory B cells, neutrophils, dendritic cells, and fibroblasts. In selected embodiments, the invention provides a method of treating pancreatic cancer, breast cancer, ovarian cancer, melanoma, lung cancer, squamous cell carcinoma including head and neck cancer, and colorectal cancer using a combination of a BTK inhibitor and a molecule selected from the group consisting of a GITR binding molecule, a 4-1BB agonist, an OX40 agonist, and combinations thereof, wherein the dose is effective to inhibit signaling between the solid tumor cells and at least one microenvironment selected from the group consisting of macrophages, monocytes, mast cells, helper T cells, cytotoxic T cells, regulatory T cells, natural killer cells, myeloid-derived suppressor cells, regulatory B cells, neutrophils, dendritic cells, and fibroblasts.

[1428] In some embodiments, the invention provides pharmaceutical compositions of a combination of a BTK inhibitor and a molecule selected from the group consisting of a GITR binding molecule, a 4-1BB agonist, an OX40 agonist, and combinations thereof for the treatment of hyperproliferative disorders as described herein. In some embodiments, the invention provides pharmaceutical compositions of a combination of a BTK inhibitor and a molecule selected from the group consisting of a GITR binding molecule, a 4-1BB agonist, an OX40 agonist, and combinations thereof for the treatment of disorders such as myeloproliferative disorders (MPDs), myeloproliferative neoplasms, polycythemia vera (PV), essential thrombocythemia (ET), primary myelofibrosis (PMF), myelodysplastic syndrome, chronic myelogenous leukemia (BCR-ABL1-positive), chronic neutrophilic leukemia, chronic eosinophilic leukemia, or mastocytosis, wherein the BTK inhibitor is selected from the group consisting of wherein the BTK inhibitor is selected from the group consisting of Formula (1), Formula (2), Formula (3), Formula (4), Formula (5), Formula (6), and Formula (7). The invention further provides a composition as described herein for the prevention of blastocyte implantation in a mammal.

### Methods of Treating Patients Intolerant to Bleeding Events

[1429] In selected embodiments, the invention provides a method of treating a disease in a human sensitive to or intolerant to bleeding events, comprising the step of administering a therapeutically effective amount of a BTK inhibitor, or a pharmaceutically-acceptable salt, cocrystal, hydrate, solvate, or prodrug thereof, and a molecule selected from the group consisting of a GITR binding molecule, a 4-1BB agonist, an OX40 agonist, and combinations thereof, or a pharmaceutically-acceptable salt, cocrystal, hydrate, solvate, or prodrug thereof. In a preferred embodiment, the invention provides a method of treating a cancer in a human sensitive to or intolerant to bleeding events, comprising the step of administering a therapeutically effective amount of a BTK inhibitor, wherein the BTK inhibitor is selected from the group consisting of Formula (1), Formula (2), Formula (3), Formula (4), Formula (5), Formula (6), and Formula (7), and a pharmaceutically-acceptable salt, cocrystal, hydrate, solvate, and prodrug thereof. In a preferred embodiment, the invention provides a method of treating a cancer in a human sensitive to or intolerant to bleeding events, comprising the step of administering a therapeutically effective amount of a BTK inhibitor and a molecule selected from the group consisting of a GITR binding molecule, a 4-1BB agonist, an OX40 agonist, and combinations thereof, wherein the BTK inhibitor is selected from the group consisting of Formula (1), Formula (2), Formula (3), Formula (4), Formula (5), Formula (6), and Formula (7), and a pharmaceutically-acceptable salt, cocrystal, hydrate, solvate, and prodrug thereof, and wherein the GITR binding molecule is selected from the group consisting of TRX518, 6C8, 36E5, 3D6, 61G6, 6H6, 61F6, 1D8, 17F10, 35D8, 49A1, 9E5, 31H6 and fragments, derivatives, conjugates, variants, biosimilars, and combinations thereof; wherein the 4-1BB agonist is selected from the group consisting of PF-05082566 (Pfizer), 1D8, 3Elor, 4B4 (BioLegend 309809), H4-1BB-M127 (BD Pharmingen 552532), BBK2 (Thermo Fisher MS621PABX), 145501 (Leinco Technologies B591), antibody produced by cell line deposited as ATCC No. HB-11248, 5F4 (BioLegend 31 1503), C65-485 (BD Pharmingen 559446), 20H4.9-IgG4 (10C7 or BMS-663513 (urelumab)), 20H4.9-IgG1 (BMS-663031), 4E9, BMS-554271, BMS-469492, 3H3, BMS-469497, 3E1, 53A2, and 3B8, and fragments, derivatives, conjugates, variants, biosimilars, and combinations thereof; and wherein the OX40 agonist is selected from the group consisting of MEDI6469 (MedImmune), MEDI0562 (MedImmune), MEDI6383 (MedImmune), MOXR0916 (Genentech), GSK3174998, and fragments, derivatives, conjugates, variants, biosimilars, and combinations thereof. In some embodiments, the invention provides a method of treating a disease in a human sensitive to or intolerant to ibrutinib.

[1430] In selected embodiments, the invention provides a method of treating a disease in a human sensitive to or intolerant to bleeding events, comprising the step of administering a therapeutically effective amount of a BTK inhibitor, or a pharmaceutically-acceptable salt, cocrystal, hydrate, solvate, or prodrug thereof, and a molecule selected from the group consisting of a GITR binding molecule, a 4-1BB agonist, an OX40 agonist, and combinations thereof or fragments, derivatives, conjugates, variants, biosimilars, and combinations thereof. In a preferred embodiment, the invention provides a method of treating a cancer in a human sensitive to or intolerant to bleeding events, comprising the step of administering a therapeutically effective amount of a BTK inhibitor, wherein the BTK inhibitor is selected from the group consisting of Formula (1), Formula (2), Formula (3), Formula (4), Formula (5), Formula (6), and Formula (7), and a pharmaceutically-acceptable salt, cocrystal, hydrate, solvate, and prodrug thereof. In a preferred embodiment, the invention provides a method of treating a cancer in a human sensitive to or intolerant to bleeding events, comprising the step of administering a therapeutically effective amount of a BTK inhibitor and a GITR binding molecule, wherein the BTK inhibitor is selected from the group consisting of Formula (1), Formula (2), Formula (3), Formula (4), Formula (5), Formula (6), and Formula (7), and a pharmaceutically-acceptable salt, cocrystal, hydrate, solvate, and prodrug thereof, and wherein the GITR binding molecule is selected from the group consisting of TRX518, 6C8, 36E5, 3D6, 61G6, 6H6, 61F6, 1D8, 17F10, 35D8, 49A1, 9E5, 31H6 and fragments, derivatives, conjugates, variants, biosimilars, and combinations thereof; wherein the 4-1BB agonist is selected from the group consisting of PF-05082566 (Pfizer), 1D8, 3Elor, 4B4 (BioLegend 309809), H4-1BB-M127 (BD Pharmingen 552532), BBK2 (Thermo Fisher MS621PABX), 145501 (Leinco Technologies B591), antibody produced by cell line deposited as ATCC No. HB-11248, 5F4 (BioLegend 31 1503), C65-485 (BD Pharmingen 559446), 20H4.9-IgG4 (10C7 or BMS-663513 (urelumab)), 20H4.9-IgG1 (BMS-663031), 4E9, BMS-554271, BMS-469492, 3H3, BMS-469497, 3E1, 53A2, and 3B8, and fragments, derivatives, conjugates, variants, biosimilars, and combinations thereof; and wherein the OX40 agonist is selected from the group consisting of MEDI6469 (MedImmune), MEDI0562 (MedImmune), MEDI6383 (MedImmune), MOXR0916 (Genentech), GSK3174998, and fragments, derivatives, conjugates, variants, biosimilars, and combinations thereof.

[1431] In an embodiment, the invention provides a method of treating a cancer in a human intolerant to bleeding events, comprising the step of administering a therapeutically effective amount of a BTK inhibitor, wherein the BTK inhibitor is selected from the group consisting of Formula (1), Formula (2), Formula (3), Formula (4), Formula (5), Formula (6), and Formula (7), or a pharmaceutically-acceptable salt, cocrystal, hydrate, solvate, or prodrug thereof, and a molecule selected from the group consisting of a GITR binding molecule, a 4-1BB agonist, an OX40 agonist, and combinations thereof, or fragments, derivatives, conjugates, variants, biosimilars, and combinations thereof, further comprising the step of administering a therapeutically effective amount of an anticoagulant or antiplatelet active pharmaceutical ingredient.

[1432] In selected embodiments, the invention provides a method of treating a cancer in a human intolerant to bleeding events, comprising the step of administering a therapeutically effective amount of a BTK inhibitor, wherein the BTK inhibitor is preferably is selected from the group consisting of Formula (1), Formula (2), Formula (3), Formula (4), Formula (5), Formula (6), and Formula (7), and wherein the cancer is selected from the group consisting of bladder cancer, squamous cell carcinoma including head and neck cancer, pancreatic ductal adenocarcinoma (PDA), pancreatic cancer, colon carcinoma, mammary carcinoma, breast cancer, fibrosarcoma, mesothelioma, renal cell carcinoma, lung carcinoma, thyoma, prostate cancer, colorectal cancer, ovarian cancer, acute myeloid leukemia, thymus cancer, brain cancer, squamous cell cancer, skin cancer, eye cancer, retinoblastoma, melanoma, intraocular melanoma, oral cavity and oropharyngeal cancers, gastric cancer, stomach cancer, cervical cancer, head, neck, renal cancer, kidney cancer, liver cancer, colorectal cancer, esophageal cancer, testicular cancer, gynecological cancer, thyroid cancer, acquired immune deficiency syndrome (AIDS)-related cancers (e.g., lymphoma and Kaposi's sarcoma), viral-induced cancer, glioblastoma, esophogeal tumors, hematological neoplasms, non-small-cell lung cancer, chronic myelocytic leukemia, diffuse large B-cell lymphoma, esophagus tumor, follicle center lymphoma, head and neck tumor, hepatitis C virus infection, hepatocellular carcinoma, Hodgkin's disease, metastatic colon cancer, multiple myeloma, non-Hodgkin's lymphoma, indolent non-Hogkin's lymphoma, ovary tumor, pancreas tumor, renal cell carcinoma, small-cell lung cancer, stage IV melanoma, chronic lymphocytic leukemia, B-cell acute lymphoblastic leukemia (ALL), mature B-cell ALL, follicular lymphoma, mantle cell lymphoma, and Burkitt's lymphoma.

[1433] In some embodiments, the invention provides a method of treating a cancer in a human intolerant to platelet-mediated thrombosis comprising the step of administering a therapeutically effective amount of a BTK inhibitor, wherein the BTK inhibitor is selected from the group consisting of Formula (1), Formula (2), Formula (3), Formula (4), Formula (5), Formula (6), and Formula (7), or a pharmaceutically-acceptable salt, cocrystal, hydrate, solvate, or prodrug thereof, and a molecule selected from the group consisting of a GITR binding molecule, a 4-1BB agonist, an OX40 agonist, and combinations thereof, wherein the GITR binding molecule selected from the group consisting of TRX518, 6C8, 36E5, 3D6, 61G6, 6H6, 61F6, 1D8, 17F10, 35D8, 49A1, 9E5, 31H6 and fragments, derivatives, conjugates, variants, biosimilars, and combinations thereof; wherein the 4-1BB agonist is selected from the group consisting of PF-05082566 (Pfizer), 1D8, 3Elor, 4B4 (BioLegend 309809), H4-1BB-M127 (BD Pharmingen 552532), BBK2 (Thermo Fisher MS621PABX), 145501 (Leinco Technologies B591), antibody produced by cell line deposited as ATCC No. HB-11248, 5F4 (BioLegend 31 1503), C65-485 (BD Pharmingen 559446), 20H4.9-IgG4 (10C7 or BMS-663513 (urelumab)), 20H4.9-IgG1 (BMS-663031), 4E9, BMS-554271, BMS-469492, 3H3, BMS-469497, 3E1, 53A2, and 3B8, and fragments, derivatives, conjugates, variants, biosimilars, and combinations thereof; and wherein the OX40 agonist is selected from the group consisting of MEDI6469 (MedImmune), MEDI0562 (MedImmune), MEDI6383 (MedImmune), MOXR0916 (Genentech), GSK3174998, and fragments, derivatives, conjugates, variants, biosimilars, and combinations thereof.

[1434] In some embodiments, the BTK inhibitor and the anticoagulant or the antiplatelet active pharmaceutical ingredient are administered sequentially. In some embodiments, the BTK inhibitor and the anticoagulant or the antiplatelet active pharmaceutical ingredient are administered concomitantly. In selected embodiments, the BTK inhibitor is administered before the anticoagulant or the antiplatelet active pharmaceutical ingredient. In selected embodiments, the BTK inhibitor is administered after the anticoagulant or the antiplatelet active pharmaceutical ingredient. In selected embodiments, a molecule selected from the group consisting of a GITR binding molecule, a 4-1BB agonist, an OX40 agonist, and combinations thereof is co-administered with the BTK inhibitor and the anticoagulant or the antiplatelet active pharmaceutical ingredient at the same time or at different times.

[1435] Selected anti-platelet and anticoagulant active pharmaceutical ingredients for use in the methods of the present invention include, but are not limited to, cyclooxygenase inhibitors (e.g., aspirin), adenosine diphosphate (ADP) receptor inhibitors (e.g., clopidogrel and ticlopidine), phosphodiesterase inhibitors (e.g., cilostazol), glycoprotein IIb/IIIa inhibitors (e.g., abciximab, eptifibatide, and tirofiban), and adenosine reuptake inhibitors (e.g., dipyridamole). In other embodiments, examples of anti-platelet active pharmaceutical ingredients for use in the methods of the present invention include anagrelide, aspirin/extended-release dipyridamole, cilostazol, clopidogrel, dipyridamole, prasugrel, ticagrelor, ticlopidine, vorapaxar, tirofiban HCl, eptifibatide, abciximab, argatroban, bivalirudin, dalteparin, desirudin, enoxaparin, fondaparinux, heparin, lepirudin, apixaban, dabigatran etexilate mesylate, rivaroxaban, and warfarin.

[1436] In an embodiment, the invention provides a method of treating a cancer, comprising the step of orally administering, to a human in need thereof, a Bruton's tyrosine kinase (BTK) inhibitor, wherein the BTK inhibitor is (S)-4-(8-amino-3-(1-(but-2-ynoyl)pyrrolidin-2-yl)imidazo[1,5-a]pyrazin-1-yl)-N-(pyridin-2-yl)benzamide or a pharmaceutically acceptable salt, solvate, hydrate, cocrystal, or prodrug thereof, and a molecule selected from the group consisting of a GITR binding molecule, a 4-1BB agonist, an OX40 agonist, and combinations thereof, or pharmaceutically acceptable salt, solvate, hydrate, cocrystal, or prodrug thereof, further comprising the step of administering a therapeutically effective amount of an anticoagulant or antiplatelet active pharmaceutical ingredient, wherein the anticoagulant or antiplatelet active pharmaceutical ingredient is selected from the group consisting of acenocoumarol, anagrelide, anagrelide hydrochloride, abciximab, aloxiprin, antithrombin, apixaban, argatroban, aspirin, aspirin with extended-release dipyridamole, beraprost, betrixaban, bivalirudin, carbasalate calcium, cilostazol, clopidogrel, clopidogrel bisulfate, cloricromen, dabigatran etexilate, darexaban, dalteparin, dalteparin sodium, defibrotide, dicumarol, diphenadione, dipyridamole, ditazole, desirudin, edoxaban, enoxaparin, enoxaparin sodium, eptifibatide, fondaparinux, fondaparinux sodium, heparin, heparin sodium, heparin calcium, idraparinux, idraparinux sodium, iloprost, indobufen, lepirudin, low molecular weight heparin, melagatran, nadroparin, otamixaban, parnaparin, phenindione, phenprocoumon, prasugrel, picotamide, prostacyclin, ramatroban, reviparin, rivaroxaban, sulodexide, terutroban, terutroban sodium, ticagrelor, ticlopidine, ticlopidine hydrochloride, tinzaparin, tinzaparin sodium, tirofiban, tirofiban hydrochloride, treprostinil, treprostinil sodium, triflusal, vorapaxar, warfarin, warfarin sodium, ximelagatran, salts thereof, solvates thereof, hydrates thereof, prodrugs thereof, and combinations thereof.

Combinations with Anti-CD20 Antibodies

[1437] The BTK inhibitors of the present invention and combinations of a BTK inhibitor and a molecule selected from the group consisting of a GITR binding molecule, a 4-1BB agonist, an OX40 agonist, and combinations thereof may also be safely co-administered with immunotherapeutic antibodies such as the anti-CD20 antibodies rituximab, obinutuzumab, ofatumumab, veltuzumab, tositumomab, and ibritumomab, and or antigen-binding fragments, derivatives, conjugates, variants, and radioisotope-labeled complexes thereof, which may be given alone or with conventional chemotherapeutic active pharmaceutical ingredients such as those described herein. In an embodiment, the foregoing combinations exhibit synergistic effects that may result in greater efficacy, less side effects, the use of less active pharmaceutical ingredient to achieve a given clinical result, or other synergistic effects.

[1438] In an embodiment, the invention provides a method of treating a hematological malignancy or a solid tumor cancer in a human comprising the step of administering to said human a BTK inhibitor selected from the group consisting of Formula (1), Formula (2), Formula (3), Formula (4), Formula (5), Formula (6), Formula (7), Formula (10), and Formula (21), and a pharmaceutically acceptable salt or ester, prodrug, cocrystal, solvate or hydrate thereof, and further comprising the step of administering an anti-CD20 antibody, wherein the anti-CD20 antibody is a monoclonal antibody or an antigen-binding fragment, derivative, conjugate, variant, or radioisotope-labeled complex thereof. In an embodiment, the invention provides a method of treating a hematological malignancy or a solid tumor cancer in a human comprising the step of administering to said human a BTK inhibitor selected from the group consisting of Formula (1), Formula (2), Formula (3), Formula (4), Formula (5), Formula (6), Formula (7), Formula (10), and Formula (21), and a pharmaceutically acceptable salt or ester, prodrug, cocrystal, solvate or hydrate thereof, and further comprising the step of administering an anti-CD20 antibody, wherein the anti-CD20 antibody is an anti-CD20 monoclonal antibody or an antigen-binding fragment, derivative, conjugate, variant, or radioisotope-labeled complex thereof, and wherein the anti-CD20 antibody specifically binds to human CD20 with a K_{D} selected from the group consisting of 1×10⁻⁷ M or less, 5×10⁻⁸ M or less, 1×10⁻⁸ M or less, and 5×10⁻⁹ M or less. Anti-CD20 monoclonal antibodies are classified as Type I or Type II, as described in Klein, et al., mAbs 2013, 5, 22-33. Type I anti-CD20 monoclonal antibodies are characterized by binding to the Class I epitope, localization of CD20 to lipid rafts, high complement-dependent cytotoxicity, full binding capacity, weak homotypic aggregation, and moderate cell death induction. Type II anti-CD20 monoclonal antibodies are characterized by binding to the Class I epitope, a lack of localization of CD20 to lipid rafts, low complement-dependent cytotoxicity, half binding capacity, homotypic aggregation, and strong cell death induction. Both Type I and Type II anti-CD20 monoclonal antibodies exhibit antibody-dependent cytotoxiticy (ADCC) and are thus useful with BTK inhibitors described herein. Type I anti-CD20 monoclonal antibodies include but are not limited to rituximab, ocrelizumab, and ofatumumab. Type II anti-CD20 monoclonal antibodies include but are not limited to obinutuzumab and tositumomab. In an embodiment, the foregoing methods exhibit synergistic effects that may result in greater efficacy, less side effects, the use of less active pharmaceutical ingredient to achieve a given clinical result, or other synergistic effects.

[1439] In an embodiment, the invention provides a method of treating a hematological malignancy or a solid tumor cancer in a human comprising the step of administering to said human a BTK inhibitor selected from the group consisting of Formula (1), Formula (2), Formula (3), Formula (4), Formula (5), Formula (6), Formula (7), Formula (10), and Formula (21), and a pharmaceutically acceptable salt or ester, prodrug, cocrystal, solvate or hydrate thereof, and a molecule selected from the group consisting of a GITR binding molecule, a 4-1BB agonist, an OX40 agonist, and combinations thereof, or fragments, derivatives, conjugates, variants, biosimilars, and combinations thereof, and further comprising the step of administering an anti-CD20 antibody, wherein the anti-CD20 antibody is a monoclonal antibody or an antigen-binding fragment, derivative, conjugate, variant, or radioisotope-labeled complex thereof. In an embodiment, the invention provides a method of treating a hematological malignancy or a solid tumor cancer in a human comprising the step of administering to said human a BTK inhibitor selected from the group consisting of Formula (1), Formula (2), Formula (3), Formula (4), Formula (5), Formula (6), Formula (7), Formula (10), and Formula (21), and a pharmaceutically acceptable salt or ester, prodrug, cocrystal, solvate or hydrate thereof, a molecule selected from the group consisting of a GITR binding molecule, a 4-1BB agonist, an OX40 agonist, and combinations thereof, wherein the GITR binding molecule selected from the group consisting of TRX518, 6C8, 36E5, 3D6, 61G6, 6H6, 61F6, 1D8, 17F10, 35D8, 49A1, 9E5, 31H6 and fragments, derivatives, conjugates, variants, biosimilars, and combinations thereof, wherein the 4-1BB agonist is selected from the group consisting of PF-05082566 (Pfizer), 1D8, 3Elor, 4B4 (BioLegend 309809), H4-1BB-M127 (BD Pharmingen 552532), BBK2 (Thermo Fisher MS621PABX), 145501 (Leinco Technologies B591), antibody produced by cell line deposited as ATCC No. HB-11248, 5F4 (BioLegend 31 1503), C65-485 (BD Pharmingen 559446), 20H4.9-IgG4 (10C7 or BMS-663513 (urelumab)), 20H4.9-IgG1 (BMS-663031), 4E9, BMS-554271, BMS-469492, 3H3, BMS-469497, 3E1, 53A2, and 3B8, and fragments, derivatives, conjugates, variants, biosimilars, and combinations thereof; wherein the OX40 agonist is selected from the group consisting of MEDI6469 (MedImmune), MEDI0562 (MedImmune), MEDI6383 (MedImmune), MOXR0916 (Genentech), GSK3174998, and fragments, derivatives, conjugates, variants, biosimilars, and combinations thereof, and further comprising the step of administering an anti-CD20 antibody, wherein the anti-CD20 antibody is an anti-CD20 monoclonal antibody or an antigen-binding fragment, derivative, conjugate, variant, or radioisotope-labeled complex thereof, and wherein the anti-CD20 antibody specifically binds to human CD20 with a K_{D} selected from the group consisting of 1×10⁻⁷ M or less, 5×10⁻⁸ M or less, 1×10⁻⁸ M or less, and 5×10⁻⁹ M or less.

[1440] In an embodiment, the invention provides a method of treating a hematological malignancy or a solid tumor cancer in a human comprising the step of administering to said human a BTK inhibitor selected from the group consisting of Formula (1), Formula (2), Formula (3), Formula (4), Formula (5), Formula (6), and Formula (7), or a pharmaceutically acceptable salt or ester, prodrug, cocrystal, solvate or hydrate thereof, and further comprising the step of administering an Type I anti-CD20 antibody, or an antigen-binding fragment, derivative, conjugate, variant, or radioisotope-labeled complex thereof. In an embodiment, the invention provides a method of treating a hematological malignancy or a solid tumor cancer in a human comprising the step of administering to said human a BTK inhibitor selected from the group consisting of Formula (1), Formula (2), Formula (3), Formula (4), Formula (5), Formula (6), Formula (7), Formula (10), and Formula (21), and a pharmaceutically acceptable salt or ester, prodrug, cocrystal, solvate or hydrate thereof, and further comprising the step of administering an Type II anti-CD20 antibody, or an antigen-binding fragment, derivative, conjugate, variant, or radioisotope-labeled complex thereof. In an embodiment, the invention provides a method of treating a hematological malignancy or a solid tumor cancer in a human comprising the step of administering to said human a BTK inhibitor selected from the group consisting of Formula (1), Formula (2), Formula (3), Formula (4), Formula (5), Formula (6), Formula (7), Formula (10), and Formula (21), and a pharmaceutically acceptable salt or ester, prodrug, cocrystal, solvate or hydrate thereof, and a GITR binding molecule or fragments, derivatives, conjugates, variants, biosimilars, and combinations thereof, and further comprising the step of administering an Type I anti-CD20 antibody, or an antigen-binding fragment, derivative, conjugate, variant, or radioisotope-labeled complex thereof. In an embodiment, the invention provides a method of treating a hematological malignancy or a solid tumor cancer in a human comprising the step of administering to said human a BTK inhibitor selected from the group consisting of Formula (1), Formula (2), Formula (3), Formula (4), Formula (5), Formula (6), Formula (7), Formula (10), and Formula (21), and a pharmaceutically acceptable salt or ester, prodrug, cocrystal, solvate or hydrate thereof, and a molecule selected from the group consisting of a GITR binding molecule, a 4-1BB agonist, an OX40 agonist, and combinations thereof or fragments, derivatives, conjugates, variants, biosimilars, and combinations thereof, and further comprising the step of administering an Type II anti-CD20 antibody, or an antigen-binding fragment, derivative, conjugate, variant, or radioisotope-labeled complex thereof.

[1441] In selected embodiments, the BTK inhibitors of the present invention and combinations of a BTK inhibitor and a molecule selected from the group consisting of a GITR binding molecule, a 4-1BB agonist, an OX40 agonist, and combinations thereof, and the anti-CD20 monoclonal antibody are administered sequentially. In selected embodiments, the BTK inhibitors of the present invention and combinations of a BTK inhibitor and a molecule selected from the group consisting of a GITR binding molecule, a 4-1BB agonist, an OX40 agonist, and combinations thereof, and the anti-CD20 monoclonal antibody are administered concomitantly. In selected embodiments, the BTK inhibitors of the present invention and combinations of a BTK inhibitor and a molecule selected from the group consisting of a GITR binding molecule, a 4-1BB agonist, an OX40 agonist, and combinations thereof are administered before the anti-CD20 monoclonal antibody. In selected embodiments, the BTK inhibitors of the present invention and combinations of a BTK inhibitor and a molecule selected from the group consisting of a GITR binding molecule, a 4-1BB agonist, an OX40 agonist, and combinations thereof are administered after the anti-CD20 monoclonal antibody. In selected embodiments, the BTK inhibitors of the present invention and combinations of a BTK inhibitor and a molecule selected from the group consisting of a GITR binding molecule, a 4-1BB agonist, an OX40 agonist, and combinations thereof and the anti-CD20 monoclonal antibody are administered over the same time period, and the BTK inhibitor administration continues after the anti-CD20 monoclonal antibody administration is completed.

[1442] In an embodiment, the anti-CD20 monoclonal antibody is rituximab, or an antigen-binding fragment, derivative, conjugate, variant, or radioisotope-labeled complex thereof. Rituximab is a chimeric murine-human monoclonal antibody directed against CD20, and its structure comprises an IgG1 kappa immunoglobulin containing murine light- and heavy-chain variable region sequences and human constant region sequences. Rituximab is composed of two heavy chains of 451 amino acids and two light chains of 213 amino acids. The amino acid sequence for the heavy chains of rituximab is set forth in SEQ ID NO:365. The amino acid sequence for the light chains of rituximab is set forth in SEQ ID NO:366. Rituximab is commercially available, and its properties and use in cancer and other diseases is described in more detail in Rastetter, et al., Ann. Rev. Med. 2004, 55, 477-503, and in Plosker and Figgett, Drugs, 2003, 63, 803-43. In an embodiment, the anti-CD20 monoclonal antibody is an anti-CD20 biosimilar monoclonal antibody approved by drug regulatory authorities with reference to rituximab. In an embodiment, the anti-CD20 monoclonal antibody has a heavy chain sequence identity of greater than 90% to SEQ ID NO:365. In an embodiment, the anti-CD20 monoclonal antibody has a light chain sequence identity of greater than 90% to SEQ ID NO:366. In an embodiment, the anti-CD20 monoclonal antibody has a heavy chain sequence identity of greater than 95% to SEQ ID NO:365. In an embodiment, the anti-CD20 monoclonal antibody has a light chain sequence identity of greater than 95% to SEQ ID NO:366. In an embodiment, the anti-CD20 monoclonal antibody has a heavy chain sequence identity of greater than 98% to SEQ ID NO:365. In an embodiment, the anti-CD20 monoclonal antibody has a light chain sequence identity of greater than 98% to SEQ ID NO:366. In an embodiment, the anti-CD20 monoclonal antibody has a heavy chain sequence identity of greater than 99% to SEQ ID NO:365. In an embodiment, the anti-CD20 monoclonal antibody has a light chain sequence identity of greater than 99% to SEQ ID NO:366.

[1443] In an embodiment, the anti-CD20 monoclonal antibody is obinutuzumab, or an antigen-binding fragment, derivative, conjugate, variant, or radioisotope-labeled complex thereof. Obinutuzumab is also known as afutuzumab or GA-101. Obinutuzumab is a humanized monoclonal antibody directed against CD20. The amino acid sequence for the heavy chains of obinutuzumab is set forth in SEQ ID NO:367. The amino acid sequence for the light chains of obinutuzumab is set forth in SEQ ID NO:368. Obinutuzumab is commercially available, and its properties and use in cancer and other diseases is described in more detail in Robak, Curr. Opin. Investig. Drugs 2009, 10, 588-96. In an embodiment, the anti-CD20 monoclonal antibody is an anti-CD20 biosimilar monoclonal antibody approved by drug regulatory authorities with reference to obinutuzumab. In an embodiment, the anti-CD20 monoclonal antibody has a heavy chain sequence identity of greater than 90% to SEQ ID NO:367. In an embodiment, the anti-CD20 monoclonal antibody has a light chain sequence identity of greater than 90% to SEQ ID NO:368. In an embodiment, the anti-CD20 monoclonal antibody has a heavy chain sequence identity of greater than 95% to SEQ ID NO:367. In an embodiment, the anti-CD20 monoclonal antibody has a light chain sequence identity of greater than 95% to SEQ ID NO:368. In an embodiment, the anti-CD20 monoclonal antibody has a heavy chain sequence identity of greater than 98% to SEQ ID NO:367. In an embodiment, the anti-CD20 monoclonal antibody has a light chain sequence identity of greater than 98% to SEQ ID NO:368. In an embodiment, the anti-CD20 monoclonal antibody has a heavy chain sequence identity of greater than 99% to SEQ ID NO:367. In an embodiment, the anti-CD20 monoclonal antibody has a light chain sequence identity of greater than 99% to SEQ ID NO:368. In an embodiment, the anti-CD20 monoclonal antibody obinutuzumab is an immunoglobulin G1, anti-(human B-lymphocyte antigen CD20 (membrane-spanning 4-domains subfamily A member 1, B-lymphocyte surface antigen B1, Leu-16 or Bp35)), humanized mouse monoclonal obinutuzumab des-CH3107-K-γ1 heavy chain (222-219′)-disulfide with humanized mouse monoclonal obinutuzumab κ light chain dimer (228-228″:231-231″)-bisdisulfide antibody.

[1444] In an embodiment, the anti-CD20 monoclonal antibody is ofatumumab, or an antigen-binding fragment, derivative, conjugate, variant, or radioisotope-labeled complex thereof. Ofatumumab is described in Cheson, J. Clin. Oncol. 2010, 28, 3525-30. The crystal structure of the Fab fragment of ofatumumab has been reported in Protein Data Bank reference 3GIZ and in Du, et al., Mol. Immunol. 2009, 46, 2419-2423. Ofatumumab is commercially available, and its preparation, properties, and use in cancer and other diseases are described in more detail in U.S. Pat. No. 8,529,202 B2, the disclosure of which is incorporated herein by reference. In an embodiment, the anti-CD20 monoclonal antibody is an anti-CD20 biosimilar monoclonal antibody approved by drug regulatory authorities with reference to ofatumumab. In an embodiment, the anti-CD20 monoclonal antibody has a variable heavy chain sequence identity of greater than 90% to SEQ ID NO:369. In an embodiment, the anti-CD20 monoclonal antibody has a variable light chain sequence identity of greater than 90% to SEQ ID NO:370. In an embodiment, the anti-CD20 monoclonal antibody has a variable heavy chain sequence identity of greater than 95% to SEQ ID NO:369. In an embodiment, the anti-CD20 monoclonal antibody has a variable light chain sequence identity of greater than 95% to SEQ ID NO:370. In an embodiment, the anti-CD20 monoclonal antibody has a variable heavy chain sequence identity of greater than 98% to SEQ ID NO:369. In an embodiment, the anti-CD20 monoclonal antibody has a variable light chain sequence identity of greater than 98% to SEQ ID NO:370. In an embodiment, the anti-CD20 monoclonal antibody has a variable heavy chain sequence identity of greater than 99% to SEQ ID NO:369. In an embodiment, the anti-CD20 monoclonal antibody has a variable light chain sequence identity of greater than 99% to SEQ ID NO:370. In an embodiment, the anti-CD20 monoclonal antibody has a Fab fragment heavy chain sequence identity of greater than 90% to SEQ ID NO:371. In an embodiment, the anti-CD20 monoclonal antibody has a Fab fragment light chain sequence identity of greater than 90% to SEQ ID NO:372. In an embodiment, the anti-CD20 monoclonal antibody has a Fab fragment heavy chain sequence identity of greater than 95% to SEQ ID NO:371. In an embodiment, the anti-CD20 monoclonal antibody has a Fab fragment light chain sequence identity of greater than 95% to SEQ ID NO:372. In an embodiment, the anti-CD20 monoclonal antibody has a Fab fragment heavy chain sequence identity of greater than 98% to SEQ ID NO:371. In an embodiment, the anti-CD20 monoclonal antibody has a Fab fragment light chain sequence identity of greater than 98% to SEQ ID NO:372. In an embodiment, the anti-CD20 monoclonal antibody has a Fab fragment heavy chain sequence identity of greater than 99% to SEQ ID NO:371. In an embodiment, the anti-CD20 monoclonal antibody has a Fab fragment light chain sequence identity of greater than 99% to SEQ ID NO:372. In an embodiment, the anti-CD20 monoclonal antibody ofatumumab is an immunoglobulin G1, anti-(human B-lymphocyte antigen CD20 (membrane-spanning 4-domains subfamily A member 1, B-lymphocyte surface antigen B1, Leu-16 or Bp35)); human monoclonal ofatumumab-CD20 γ1 heavy chain (225-214′)-disulfide with human monoclonal ofatumumab-CD20 κ light chain, dimer (231-231″:234-234″)-bisdisulfide antibody.

[1445] In an embodiment, the anti-CD20 monoclonal antibody is veltuzumab, or an antigen-binding fragment, derivative, conjugate, variant, or radioisotope-labeled complex thereof. Veltuzumab is also known as hA20. Veltuzumab is described in Goldenberg, et al., Leuk Lymphoma 2010, 51, 747-55. In an embodiment, the anti-CD20 monoclonal antibody is an anti-CD20 biosimilar monoclonal antibody approved by drug regulatory authorities with reference to veltuzumab. In an embodiment, the anti-CD20 monoclonal antibody has a heavy chain sequence identity of greater than 90% to SEQ ID NO:373. In an embodiment, the anti-CD20 monoclonal antibody has a light chain sequence identity of greater than 90% to SEQ ID NO:374. In an embodiment, the anti-CD20 monoclonal antibody has a heavy chain sequence identity of greater than 95% to SEQ ID NO:373. In an embodiment, the anti-CD20 monoclonal antibody has a light chain sequence identity of greater than 95% to SEQ ID NO:374. In an embodiment, the anti-CD20 monoclonal antibody has a heavy chain sequence identity of greater than 98% to SEQ ID NO:373. In an embodiment, the anti-CD20 monoclonal antibody has a light chain sequence identity of greater than 98% to SEQ ID NO:374. In an embodiment, the anti-CD20 monoclonal antibody has a heavy chain sequence identity of greater than 99% to SEQ ID NO:373. In an embodiment, the anti-CD20 monoclonal antibody has a light chain sequence identity of greater than 99% to SEQ ID NO:374. In an embodiment, the anti-CD20 monoclonal antibody ofatumumab is an immunoglobulin G1, anti-(human B-lymphocyte antigen CD20 (membrane-spanning 4-domains subfamily A member 1, Leu-16, Bp35)); [218-arginine, 360-glutamic acid, 362-methionine]humanized mouse monoclonal hA20 γ1 heavy chain (224-213′)-disulfide with humanized mouse monoclonal hA20 κ light chain (230-230″:233-233″)-bisdisulfide dimer

[1446] In an embodiment, the anti-CD20 monoclonal antibody is tositumomab, or an antigen-binding fragment, derivative, conjugate, variant, or radioisotope-labeled complex thereof. In an embodiment, the anti-CD20 monoclonal antibody is ¹³¹I-labeled tositumomab. In an embodiment, the anti-CD20 monoclonal antibody is an anti-CD20 biosimilar monoclonal antibody approved by drug regulatory authorities with reference to tositumomab. In an embodiment, the anti-CD20 monoclonal antibody has a heavy chain sequence identity of greater than 90% to SEQ ID NO:375. In an embodiment, the anti-CD20 monoclonal antibody has a light chain sequence identity of greater than 90% to SEQ ID NO:376. In an embodiment, the anti-CD20 monoclonal antibody has a heavy chain sequence identity of greater than 95% to SEQ ID NO:375. In an embodiment, the anti-CD20 monoclonal antibody has a light chain sequence identity of greater than 95% to SEQ ID NO:376. In an embodiment, the anti-CD20 monoclonal antibody has a heavy chain sequence identity of greater than 98% to SEQ ID NO:375. In an embodiment, the anti-CD20 monoclonal antibody has a light chain sequence identity of greater than 98% to SEQ ID NO:376. In an embodiment, the anti-CD20 monoclonal antibody has a heavy chain sequence identity of greater than 99% to SEQ ID NO:375. In an embodiment, the anti-CD20 monoclonal antibody has a light chain sequence identity of greater than 99% to SEQ ID NO:376.

[1447] In an embodiment, the anti-CD20 monoclonal antibody is ibritumomab, or an antigen-binding fragment, derivative, conjugate, variant, or radioisotope-labeled complex thereof. The active form of ibritumomab used in therapy is ibritumomab tiuxetan. When used with ibritumomab, the chelator tiuxetan (diethylene triamine pentaacetic acid) is complexed with a radioactive isotope such as ⁹⁰Y or ¹¹¹In. In an embodiment, the anti-CD20 monoclonal antibody is ibritumomab tiuxetan, or radioisotope-labeled complex thereof. In an embodiment, the anti-CD20 monoclonal antibody is an anti-CD20 biosimilar monoclonal antibody approved by drug regulatory authorities with reference to tositumomab. In an embodiment, the anti-CD20 monoclonal antibody has a heavy chain sequence identity of greater than 90% to SEQ ID NO:377. In an embodiment, the anti-CD20 monoclonal antibody has a light chain sequence identity of greater than 90% to SEQ ID NO:378. In an embodiment, the anti-CD20 monoclonal antibody has a heavy chain sequence identity of greater than 95% to SEQ ID NO:377. In an embodiment, the anti-CD20 monoclonal antibody has a light chain sequence identity of greater than 95% to SEQ ID NO:378. In an embodiment, the anti-CD20 monoclonal antibody has a heavy chain sequence identity of greater than 98% to SEQ ID NO:377. In an embodiment, the anti-CD20 monoclonal antibody has a light chain sequence identity of greater than 98% to SEQ ID NO:378. In an embodiment, the anti-CD20 monoclonal antibody has a heavy chain sequence identity of greater than 99% to SEQ ID NO:377. In an embodiment, the anti-CD20 monoclonal antibody has a light chain sequence identity of greater than 99% to SEQ ID NO:378.

[1448] In an embodiment, an anti-CD20 antibody selected from the group consisting of obinutuzumab, ofatumumab, veltuzumab, tositumomab, and ibritumomab, and or antigen-binding fragments, derivatives, conjugates, variants, and radioisotope-labeled complexes thereof, is administered to a subject by infusing a dose selected from the group consisting of about 10 mg, about 20 mg, about 25 mg, about 50 mg, about 75 mg, 100 mg, about 200 mg, about 300 mg, about 400 mg, about 500 mg, about 600 mg, about 700 mg, about 800 mg, about 900 mg, about 1000 mg, about 1100 mg, about 1200 mg, about 1300 mg, about 1400 mg, about 1500 mg, about 1600 mg, about 1700 mg, about 1800 mg, about 1900 mg, and about 2000 mg. In an embodiment, the anti-CD20 antibody is administered weekly. In an embodiment, the anti-CD20 antibody is administered every two weeks. In an embodiment, the anti-CD20 antibody is administered every three weeks. In an embodiment, the anti-CD20 antibody is administered monthly. In an embodiment, the anti-CD20 antibody is administered at a lower initial dose, which is escalated when administered at subsequent intervals administered monthly. For example, the first infusion can deliver 300 mg of anti-CD20 antibody, and subsequent weekly doses could deliver 2,000 mg of anti-CD20 antibody for eight weeks, followed by monthly doses of 2,000 mg of anti-CD20 antibody. During any of the foregoing embodiments, the BTK inhibitors of the present invention and combinations of the BTK inhibitors with GITR binding molecules may be administered daily, twice daily, or at different intervals as described above, at the dosages described above.

[1449] In an embodiment, the invention provides a kit comprising a first composition comprising a BTK inhibitor and a second composition comprising a molecule selected from the group consisting of a GITR binding molecule, a 4-1BB agonist, an OX40 agonist, and combinations thereof and an anti-CD20 antibody selected from the group consisting of rituximab, obinutuzumab, ofatumumab, veltuzumab, tositumomab, and ibritumomab, or an antigen-binding fragment, derivative, conjugate, variant, or radioisotope-labeled complex thereof, for use in the treatment of CLL or SLL, hematological malignancies, B cell malignancies or, or any of the other diseases described herein. The compositions are typically both pharmaceutical compositions. The kit is for use in co-administration of the anti-CD20 antibody and the BTK inhibitor, either simultaneously or separately, in the treatment of CLL or SLL, hematological malignancies, B cell malignancies, or any of the other diseases described herein.

[1450] In an embodiment, the anti-CD20 monoclonal antibody is an anti-CD20 biosimilar monoclonal antibody approved by drug regulatory authorities with reference to rituximab, obinutuzumab, ofatumumab, veltuzumab, tositumomab, or ibritumomab. In an embodiment, the biosimilar comprises an anti-CD20 antibody comprising an amino acid sequence which has at least 97% sequence identity, e.g., 97%, 98%, 99% or 100% sequence identity, to the amino acid sequence of a reference medicinal product or reference biological product and which comprises one or more post-translational modifications as compared to the reference medicinal product or reference biological product, wherein the reference medicinal product or reference biological product is rituximab, obinutuzumab, ofatumumab, veltuzumab, tositumomab, or ibritumomab. In some embodiments, the one or more post-translational modifications are selected from one or more of: glycosylation, oxidation, deamidation, and truncation. In some embodiments, the biosimilar is an anti-CD20 antibody authorized or submitted for authorization, wherein the anti-CD20 antibody is provided in a formulation which differs from the formulations of a reference medicinal product or reference biological product, wherein the reference medicinal product or reference biological product is rituximab, obinutuzumab, ofatumumab, veltuzumab, tositumomab, or ibritumomab. The anti-CD20 antibody may be authorized by a drug regulatory authority such as the U.S. FDA and/or the European Union's EMA. In some embodiments, the biosimilar is provided as a composition which further comprises one or more excipients, wherein the one or more excipients are the same or different to the excipients comprised in a reference medicinal product or reference biological product, wherein the reference medicinal product or reference biological product is rituximab, obinutuzumab, ofatumumab, veltuzumab, tositumomab, or ibritumomab. In some embodiments, the biosimilar comprises one or more excipients selected from tris-hydrochloride, sodium chloride, mannitol, pentetic acid, polysorbate 80, sodium hydroxide, and hydrochloric acid.

[1451] The anti-CD20 antibody sequences referenced in the foregoing are summarized in Table 15.

TABLE 15
Anti-CD20 antibody sequences.

| Identifier | Sequence (One-Letter Amino Acid Symbols) | |
|---|---|---|
| SEQ ID NO: 365 | QVQLQQPGAE LVKPGASVKM SCKASGYTFT SYNMHWVKQT PGRGLEWIGA IYPGNGDTSY | 60 |
| rituximab heavy | NQKFKGKATL TADKSSSTAY MQLSSLTSED SAVYYCARST YYGGDWYFNV WGAGTTVTVS | 120 |
| chain | AASTKGPSVF PLAPSSKSTS GGTAALGCLV KDYFPEPVTV SWNSGALTSG VHTFPAVLQS | 180 |
| | SGLYSLSSVV TVPSSSLGTQ TYICNVNHKP SNTKVDKKVE PKSCDKTHTC PPCPAPELLG | 240 |
| | GPSVFLFPPK PKDTLMISRT PEVTCVVVDV SHEDPEVKFN WYVDGVEVHN AKTKPREEQY | 300 |
| | NSTYRVVSVL TVLHQDWLNG KEYKCKVSNK ALPAPIEKTI SKAKGQPREP QVYTLPPSRD | 360 |
| | ELTKNQVSLT CLVKGFYPSD IAVEWESNGQ PENNYKTTPP VLDSDGSFFL YSKLTVDKSR | 420 |
| | WQQGNVFSCS VMHEALHNHY TQKSLSLSPG K | 451 |
| SEQ ID NO: 366 | QIVLSQSPAI LSASPGEKVT MTCRASSSVS YIHWFQQKPG SSPKPWIYAT SNLASGVPVR | 60 |
| rituximab light | FSGSGSGTSY SLTISRVEAE DAATYYCQQW TSNPPTFGGG TKLEIKRTVA APSVFIFPPS | 120 |
| chain | DEQLKSGTAS VVCLLNNFYP REAKVQWKVD NALQSGNSQE SVTEQDSKDS TYSLSSTLTL | 180 |
| | SKADYEKHKV YACEVTHQGL SSPVTKSFNR GEC | 213 |
| SEQ ID NO: 367 | QVQLVQSGAE VKKPGSSVKV SCKASGYAFS YSWINWVRQA PGQGLEWMGR IFPGDGDTDY | 60 |
| obinutuzumab | NGKFKGRVTI TADKSTSTAY MELSSLRSED TAVYYCARNV FDGYWLVYWG QGTLVTVSSA | 120 |
| heavy chain | STKGPSVFPL APSSKSTSGG TAALGCLVKD YFPEPVTVSW NSGALTSGVH TFPAVLQSSG | 180 |
| | LYSLSSVVTV PSSSLGTQTY ICNVNHKPSN TKVDKKVEPK SCDKTHTCPP CPAPELLGGP | 240 |
| | SVFLFPPKPK DTLMISRTPE VTCVVVDVSH EDPEVKFNWY VDGVEVHNAK TKPREEQYNS | 300 |
| | TYRVVSVLTV LHQDWLNGKE YKCKVSNKAL PAPIEKTISK AKGQPREPQV YTLPPSRDEL | 360 |
| | TKNQVSLTCL VKGFYPSDIA VEWESNGQPE NNYKTTPPVL DSDGSFFLYS KLTVDKSRWQ | 420 |
| | QGNVFSCSVM HEALHNHYTQ KSLSLSPGK | 449 |
| SEQ ID NO: 368 | DIVMTQTPLS LPVTPGEPAS ISCRSSKSLL HSNGITYLYW YLQKPGQSPQ LLIYQMSNLV | 60 |
| obinutuzumab | SGVPDRFSGS GSGTDFTLKI SRVEAEDVGV YYCAQNLELP YTFGGGTKVE IKRTVAAPSV | 120 |
| light chain | FIFPPSDEQL KSGTASVVCL LNNFYPREAK VQWKVDNALQ SGNSQESVTE QDSKDSTYSL | 180 |
| | SSTLTLSKAD YEKHKVYACE VTHQGLSSPV TKSFNRGEC | 219 |
| SEQ ID NO: 369 | EVQLVESGGG LVQPGRSLRL SCAASGFTFN DYAMHWVRQA PGKGLEWVST ISWNSGSIGY | 60 |
| ofatumumab | ADSVKGRFTI SRDNAKKSLY LQMNSLRAED TALYYCAKDI QYGNYYYGMD VWGQGTTVTV | 120 |
| variable heavy | SS | 122 |
| chain | | |
| SEQ ID NO: 370 | EIVLTQSPAT LSLSPGERAT LSCRASQSVS SYLAWYQQKP GQAPRLLIYD ASNRATGIPA | 60 |
| ofatumumab | RFSGSGSGTD FTLTISSLEP EDFAVYYCQQ RSNWPITFGQ GTRLEIK | 107 |
| variable light | | |
| chain | | |
| SEQ ID NO: 371 | EVQLVESGGG LVQPGRSLRL SCAASGFTFN DYAMHWVRQA PGKGLEWVST ISWNSGSIGY | 60 |
| ofatumumab Fab | ADSVKGRFTI SRDNAKKSLY LQMNSLRAED TALYYCAKDI QYGNYYYGMD VWGQGTTVTV | 120 |
| fragment heavy | SSASTKGPSV FPLAPGSSKS TSGTAALGCL VKDYFPEPVT VSWNSGALTS GVHTFPAVLQ | 180 |
| chain | SSGLYSLSSV VTVPSSSLGT QTYICNVNHK PSNTKVDKKV EP | 222 |
| SEQ ID NO: 372 | EIVLTQSPAT LSLSPGERAT LSCRASQSVS SYLAWYQQKP GQAPRLLIYD ASNRATGIPA | 60 |
| ofatumumab Fab | RFSGSGSGTD FTLTISSLEP EDFAVYYCQQ RSNWPITFGQ GTRLEIKRTV AAPSVFIFPP | 120 |
| fragment light | SDEQLKSGTA SVVCLLNNFY PREAKVQWKV DNALQSGNSQ ESVTEQDSKD STYSLSSTLT | 180 |
| chain | LSKADYEKHK VYACEVTHQG LSSPVTKSFN R | 211 |
| SEQ ID NO: 373 | QVQLQQSGAE VKKPGSSVKV SCKASGYTFT SYNMHWVKQA PGQGLEWIGA IYPGMGDTSY | 60 |
| veltuzumab heavy | NQKFKGKATL TADESTNTAY MELSSLRSED TAFYYCARST YYGGDWYFDV WGQGTTVTVS | 120 |
| chain | SASTKGPSVF PLAPSSKSTS GGTAALGCLV KDYFPEPVTV SWNSGALTSG VHTFPAVLQS | 180 |
| | SGLYSLSSVV TVPSSSLGTQ TYICNVNHKP SNTKVDKRVE PKSCDKTHTC PPCPAPELLG | 240 |
| | GPSVFLFPPK PKDTLMISRT PEVTCVVVDV SHEDPEVKFN WYVDGVEVHN AKTKPREEQY | 300 |
| | NSTYRVVSVL TVLHQDWLNG KEYKCKVSNK ALPAPIEKTI SKAKGQPREP QVYTLPPSRE | 360 |
| | EMTKNQVSLT CLVKGFYPSD IAVEWESNGQ PENNYKTTPP VLDSDGSFFL YSKLTVDKSR | 420 |
| | WQQGNVFSCS VMHEALHNHY TQKSLSLSPG K | 451 |
| SEQ ID NO: 374 | DIQLTQSPSS LSASVGDRVT MTCRASSSVS YIHWFQQKPG KAPKPWIYAT SNLASGVPVR | 60 |
| veltuzumab light | FSGSGSGTDY TFTISSLQPE DIATYYCQQW TSNPPTFGGG TKLEIKRTVA APSVFIFPPS | 120 |
| chain | DEQLKSGTAS VVCLLNNFYP REAKVQWKVD NALQSGNSQE SVTEQDSKDS TYSLSSTLTL | 180 |
| | SKADYEKHKV YACEVTHQGL SSPVTKSFNR GEC | 213 |
| SEQ ID NO: 375 | QAYLQQSGAE LVRPGASVKM SCKASGYTFT SYNMHWVKQT PRQGLEWIGA IYPGNGDTSY | 60 |
| tositumomab | NQKFKGKATL TVDKSSSTAY MQLSSLTSED SAVYFCARVV YYSNSYWYFD VWGTGTTVTV | 120 |
| heavy chain | SGPSVFPLAP SSKSTSGGTA ALGCLVKDYF PEPVTVSWNS GALTSGVHTF PAVLQSSGLY | 180 |
| | SLSSVVTVPS SSLGTQTYIC NVNHKPSNTK VDKKAEPKSC DKTHTCPPCP APELLGGPSV | 240 |
| | FLFPPKPKDT LMISRTPEVT CVVVDVSHED PEVKFNWYVD GVEVHNAKTK PREEQYNSTY | 300 |
| | RVVSVLTVLH QDWLNGKEYK CKVSNKALPA PIEKTISKAK GQPREPQVYT LPPSRDELTK | 360 |
| | NQVSLTCLVK GFYPSDIAVE WESNGQPENN YKTTPPVLDS DGSFFLYSKL TVDKSRWQQG | 420 |
| | NVFSCSVMHE ALHNHYTQKS LSLSPGK | 447 |
| SEQ ID NO: 376 | QIVLSQSPAI LSASPGEKVT MTCRASSSVS YMHWYQQKPG SSPKPWIYAP SNLASGVPAR | 60 |
| tositumomab | FSGSGSGTSY SLTISRVEAE DAATYYCQQW SFNPPTFGAG TKLELKRTVA APSVFIFPPS | 120 |
| light chain | DEQLKSGTAS VVCLLNNFYP REAKVQWKVD NALQSGNSQE SVTEQDSKDS TYSLSSTLTL | 180 |
| | SKADYEKHKV YACEVTHQGL SSPVTKSFNR | 210 |
| SEQ ID NO: 377 | QAYLQQSGAE LVRPGASVKM SCKASGYTFT SYNMHWVKQT PRQGLEWIGA IYPGNGDTSY | 60 |
| ibritumomab | NQKFKGKATL TVDKSSSTAY MQLSSLTSED SAVYFCARVV YYSNSYWYFD VWGTGTTVTV | 120 |
| heavy chain | SAPSVYPLAP VCGDTTGSSV TLGCLVKGYF PEPVTLTWNS GSLSSGVHTF PAVLQSDLYT | 180 |
| | LSSSVTVTSS TWPSQSITCN VAHPASSTKV DKKIEPRGPT IKPCPPCKCP APNLLGGPSV | 240 |
| | FIFPPKIKDV LMISLSPIVT CVVVDVSEDD PDVQISWFVN NVEVHTAQTQ THREDYNSTL | 300 |
| | RVVSALPIQH QDWMSGKEFK CKVNNKDLPA PIERTISKPK GSVRAPQVYV LPPPEEEMTK | 360 |
| | KQVTLTCMVT DFMPEDIYVE WTNNGKTELN YKNTEPVLDS DGSYFMYSKL RVEKKNWVER | 420 |
| | NSYSCSVVHE GLHNHHTTKS FSR | 443 |
| SEQ ID NO: 378 | QIVLSQSPAI LSASPGEKVT MTCRASSSVS YMHWYQQKPG SSPKPWIYAP SNLASGVPAR | 60 |
| ibritumomab | FSGSGSGTSY SLTISRVEAE DAATYYCQQW SFNPPTFGAG TKLELKRADA APTVFIFPPS | 120 |
| light chain | DEQLKSGTAS VVCLLNNFYP REAKVQWKVD NALQSGNSQE SVTEQDSKDS TYSLSSTLTL | 180 |
| | SKADYEKHKV YACEVTHQGL SSPVTKSFN | 209 |

Combinations with Chemotherapeutic Active Pharmaceutical Ingredients

[1452] The combinations of a BTK inhibitor and a molecule selected from the group consisting of a GITR binding molecule, a 4-1BB agonist, an OX40 agonist, and combinations thereof may also be safely co-administered with chemotherapeutic active pharmaceutical ingredients such as albumin-bound paclitaxel (nab-paclitaxel), and bendamustine or bendamustine hydrochloride. In an embodiment, the invention provides a method of treating a hematological malignancy or a solid tumor cancer in a human comprising the step of administering to said human a BTK inhibitor selected from the group consisting of Formula (1), Formula (2), Formula (3), Formula (4), Formula (5), Formula (6), Formula (7), Formula (10), and Formula (21), and pharmaceutically-acceptable salts, cocrystals, hydrates, solvates, or prodrugs thereof, and a molecule selected from the group consisting of a GITR binding molecule, a 4-1BB agonist, an OX40 agonist, and combinations thereof, or a fragment, derivative, conjugate, variant, biosimilar, or combination thereof. In an embodiment, the solid tumor cancer in any of the foregoing embodiments is pancreatic cancer.

[1453] In an embodiment, the invention provides a method of treating a hematological malignancy or a solid tumor cancer in a human comprising the step of administering to said human a BTK inhibitor and a molecule selected from the group consisting of a GITR binding molecule, a 4-1BB agonist, an OX40 agonist, and combinations thereof, and further comprising the step of administering a therapeutically-effective amount of albumin-bound paclitaxel. In an embodiment, the invention provides a method of treating a hematological malignancy or a solid tumor cancer in a human comprising the step of administering to said human a BTK inhibitor selected from the group consisting of Formula (1), Formula (2), Formula (3), Formula (4), Formula (5), Formula (6), Formula (7), Formula (10), and Formula (21), and pharmaceutically-acceptable salts, cocrystals, hydrates, solvates, or prodrugs thereof, and a molecule selected from the group consisting of a GITR binding molecule, a 4-1BB agonist, an OX40 agonist, and combinations thereof, or a fragment, derivative, conjugate, variant, biosimilar, or combination thereof, and further comprising the step of administering a therapeutically-effective amount of albumin-bound paclitaxel. In an embodiment, the solid tumor cancer in any of the foregoing embodiments is pancreatic cancer.

[1454] In an embodiment, the invention provides a method of treating a hematological malignancy or a solid tumor cancer in a human comprising the step of administering to said human a BTK inhibitor and a molecule selected from the group consisting of a GITR binding molecule, a 4-1BB agonist, an OX40 agonist, and combinations thereof, and further comprising the step of administering a therapeutically-effective amount of bendamustine hydrochloride. In an embodiment, the invention provides a method of treating a hematological malignancy or a solid tumor cancer in a human comprising the step of administering to said human a BTK inhibitor of Formula (1), Formula (2), Formula (3), Formula (4), Formula (5), Formula (6), Formula (7), Formula (10), and Formula (21), and pharmaceutically-acceptable salts, cocrystals, hydrates, solvates, or prodrugs thereof, and a molecule selected from the group consisting of a GITR binding molecule, a 4-1BB agonist, an OX40 agonist, and combinations thereof, or a fragment, derivative, conjugate, variant, biosimilar, or combination thereof, and further comprising the step of administering a therapeutically-effective amount of bendamustine hydrochloride. In an embodiment, the invention provides a method of treating a hematological malignancy or a solid tumor cancer in a human comprising the step of administering to said human a BTK inhibitor selected from the group consisting of Formula (1), Formula (2), Formula (3), Formula (4), Formula (5), Formula (6), Formula (7), Formula (10), and Formula (21), and pharmaceutically-acceptable salts, cocrystals, hydrates, solvates, or prodrugs thereof, and/or a molecule selected from the group consisting of a GITR binding molecule, a 4-1BB agonist, an OX40 agonist, and combinations thereof, or a fragment, derivative, conjugate, variant, biosimilar, or combination thereof, further comprising the step of administering a therapeutically-effective amount of bendamustine hydrochloride, and further comprising the step of administering a therapeutically-effective amount of rituximab (collectively referred to as “BR” or “BR chemotherapy”). BR chemotherapy has been shown to improve overall response rates in non-Hodgkin's lymphoma and mantle cell lymphomas and also demonstrated improved safety in comparison to alternative regimens, as described in Flinn, et al., Blood 2014, 123, 2944-52.

[1455] In an embodiment, the invention provides a method of treating a hematological malignancy or a solid tumor cancer in a human comprising the step of administering to said human a BTK inhibitor and a molecule selected from the group consisting of a GITR binding molecule, a 4-1BB agonist, an OX40 agonist, and combinations thereof, and further comprising the step of administering a therapeutically-effective amount of a combination of fludarabine, cyclophosphamide, and rituximab (which collectively may be referred to as “FCR” or “FCR chemotherapy”). In an embodiment, the invention provides a method of treating a hematological malignancy or a solid tumor cancer in a human comprising the step of administering to said human a BTK inhibitor of Formula (1), Formula (2), Formula (3), Formula (4), Formula (5), Formula (6), Formula (7), Formula (10), and Formula (21), and pharmaceutically-acceptable salts, cocrystals, hydrates, solvates, or prodrugs thereof, and further comprising the step of administering a therapeutically-effective amount of FCR chemotherapy. In an embodiment, the invention provides a hematological malignancy or a solid tumor cancer comprising the step of administering to said human a BTK inhibitor and a molecule selected from the group consisting of a GITR binding molecule, a 4-1BB agonist, an OX40 agonist, and combinations thereof, or a fragment, derivative, conjugate, variant, biosimilar, or combination thereof, and further comprising the step of administering a therapeutically-effective amount of FCR chemotherapy. FCR chemotherapy has been shown to improve survival in patients with cancer, as described in Hallek, et al., Lancet 2010, 376, 1164-1174.

[1456] In an embodiment, the invention provides a method of treating a hematological malignancy or a solid tumor cancer in a human comprising the step of administering to said human a BTK inhibitor and a molecule selected from the group consisting of a GITR binding molecule, a 4-1BB agonist, an OX40 agonist, and combinations thereof, and further comprising the step of administering a therapeutically-effective amount of a combination of rituximab, cyclophosphamide, doxorubicin hydrochloride (also referred to as hydroxydaunomycin), vincristine sulfate (also referred to as oncovin), and prednisone (which collectively may be referred to as “R-CHOP” or “R-CHOP chemotherapy”). In an embodiment, the invention provides a method of treating a hematological malignancy or a solid tumor cancer in a human comprising the step of administering to said human a BTK inhibitor of Formula (1), Formula (2), Formula (3), Formula (4), Formula (5), Formula (6), Formula (7), Formula (10), and Formula (21), and pharmaceutically-acceptable salts, cocrystals, hydrates, solvates, or prodrugs thereof, and further comprising the step of administering a therapeutically-effective amount of R-CHOP chemotherapy. In an embodiment, the invention provides a hematological malignancy or a solid tumor cancer comprising the step of administering to said human a BTK inhibitor and a molecule selected from the group consisting of a GITR binding molecule, a 4-1BB agonist, an OX40 agonist, and combinations thereof, or a fragment, derivative, conjugate, variant, biosimilar, or combination thereof, and further comprising the step of administering a therapeutically-effective amount of R-CHOP chemotherapy. R-CHOP chemotherapy has been shown to improve the 10-year progression-free and overall survival rates for patients with cancer, as described in Sehn, Blood, 2010, 116, 2000-2001.

[1457] In any of the foregoing embodiments, the chemotherapeutic active pharmaceutical ingredient or combinations thereof may be administered before, concurrently, or after administration of the GITR binding molecules and the BTK inhibitors.

Combinations with and PD-1 and PD-L1 Inhibitors

[1458] The combinations of a BTK inhibitor and a molecule selected from the group consisting of a GITR binding molecule, a 4-1BB agonist, an OX40 agonist, and combinations thereof may also be further combined with programmed death-1 (PD-1), programmed death ligand 1 (PD-L1), and/or programmed death ligand 2 (PD-L2) binding antibodies or inhibitors (i.e., blockers). Methods of using PD-1/PD-L1 antagonist (or inhibitor) antibodies in conjunction with agonistic GITR antibodies and compositions comprising PD-1/PD-L1 antagonists and GITR agonists are described in International Patent Application Publication No. WO 2015/026684 A1, the disclosures of which are incorporated by reference herein. In a preferred embodiment, the PD-1 or PD-L1 inhibitor for use in combination with a combination of a BTK inhibitor and a molecule selected from the group consisting of a GITR binding molecule, a 4-1BB agonist, an OX40 agonist, and combinations thereof is selected from the group consisting of nivolumab, pembrolizumab, pidilizumab, durvalumab, atezolizumab, avelumab, and antigen-binding fragments, variants, conjugates, or biosimilars thereof. In a preferred embodiment, the invention provides a method of treating a cancer or an immune, autoimmune, or inflammatory disease in a human comprising the step of administering to said human a BTK inhibitor, or a pharmaceutically acceptable salt, solvate, hydrate, cocrystal, or prodrug thereof, and a molecule selected from the group consisting of a GITR binding molecule, a 4-1BB agonist, an OX40 agonist, and combinations thereof, or fragments, derivatives, conjugates, variants, biosimilars, and combinations thereof, and further comprising the step of administering an PD-1 or PD-L1 inhibitor, or an antigen-binding fragment, derivative, conjugate, variant, or biosimilar thereof. In an embodiment, the BTK inhibitor is a compound selected from the group consisting of Formula (1), Formula (2), Formula (3), Formula (4), Formula (5), Formula (6), Formula (7), Formula (10), and Formula (21), and pharmaceutically acceptable salts, solvates, hydrates, cocrystals, or prodrugs thereof.

[1459] Programmed death 1 (PD-1) is a 288-amino acid transmembrane immunocheckpoint receptor protein expressed by T cells, B cells, natural killer (NK) T cells, activated monocytes, and dendritic cells. PD-1, which is also known as CD279, is an immunoreceptor belonging to the CD28 family and in humans is encoded by the Pdcd1 gene on chromosome 2. PD-1 consists of one immunoglobulin (Ig) superfamily domain, a transmembrane region, and an intracellular domain containing an immunoreceptor tyrosine-based inhibitory motif (ITIM) and an immunoreceptor tyrosine-based switch motif (ITSM). PD-1 and its ligands (PD-L1 and PD-L2) play a key role in immune tolerance, as described in Keir, et al., Annu. Rev. Immunol. 2008, 26, 677-704. PD-1 provides inhibitory signals that negatively regulate T cell immune responses. PD-L1 (also known as B7-H1 or CD274) and PD-L2 (also known as B7-DC or CD273) are expressed on tumor cells and stromal cells, which may be encountered by activated T cells expressing PD-1, leading to immunosuppression of the T cells. PD-L1 is a 290 amino acid transmembrane protein encoded by the Cd274 gene on human chromosome 9. Blocking the interaction between PD-1 and its ligands PD-L1 and PD-L2 by use of a PD-1 inhibitor, a PD-L1 inhibitor, and/or a PD-L2 inhibitor can overcome immune resistance, as demonstrated in recent clinical studies, such as that described in Topalian, et al., N. Eng. J. Med. 2012, 366, 2443-54. PD-L1 is expressed on many tumor cell lines, while PD-L2 is expressed is expressed mostly on dendritic cells and a few tumor lines. In addition to T cells (which inducibly express PD-1 after activation), PD-1 is also expressed on B cells, natural killer cells, macrophages, activated monocytes, and dendritic cells.

[1460] In an embodiment, the PD-1 inhibitor may be any PD-1 inhibitor or PD-1 blocker known in the art. In particular, it is one of the PD-1 inhibitors or blockers described in more detail in the following paragraphs. The terms “inhibitor” and “blocker” are used interchangeably herein in reference to PD-1 inhibitors. For avoidance of doubt, references herein to a PD-1 inhibitor that is an antibody may refer to a compound or antigen-binding fragments, variants, conjugates, or biosimilars thereof. For avoidance of doubt, references herein to a PD-1 inhibitor may also refer to a compound or a pharmaceutically acceptable salt, ester, solvate, hydrate, cocrystal, or prodrug thereof.

[1461] In some embodiments, the compositions and methods described herein include a PD-1 inhibitor. In some embodiments, the PD-1 inhibitor is a small molecule. In a preferred embodiment, the PD-1 inhibitor is an antibody (i.e., an anti-PD-1 antibody), a fragment thereof, including Fab fragments, or a single-chain variable fragment (scFv) thereof. In some embodiments the PD-1 inhibitor is a polyclonal antibody. In a preferred embodiment, the PD-1 inhibitor is a monoclonal antibody. In some embodiments, the PD-1 inhibitor competes for binding with PD-1, and/or binds to an epitope on PD-1. In an embodiment, the antibody competes for binding with PD-1, and/or binds to an epitope on PD-1. In some embodiments, the PD-1 inhibitor is included in a composition or a method and is further combined with a BTK inhibitor, and a molecule selected from the group consisting of a GITR binding molecule, a 4-1BB agonist, an OX40 agonist, and combinations thereof. In some embodiments, an anti-PD-1 monoclonal antibody is included in a composition or a method and is further combined with a BTK inhibitor and a molecule selected from the group consisting of a GITR binding molecule, a 4-1BB agonist, an OX40 agonist, and combinations thereof. In some embodiments, an anti-PD-1 monoclonal antibody is included in a composition or a method and is further combined with a BTK inhibitor and/or a molecule selected from the group consisting of a GITR binding molecule, a 4-1BB agonist, an OX40 agonist, and combinations thereof. In some embodiments, a PD-1 inhibitor is included in a composition or a method and is further combined with a BTK inhibitor. In some embodiments, an anti-PD-1 monoclonal antibody is included in a composition or a method and is further combined with a BTK inhibitor. In some embodiments, a PD-1 inhibitor is included in a composition or a method and is further combined with a molecule selected from the group consisting of a GITR binding molecule, a 4-1BB agonist, an OX40 agonist, and combinations thereof. In some embodiments, an anti-PD-1 monoclonal antibody is included in a composition or a method and is further combined with a molecule selected from the group consisting of a GITR binding molecule, a 4-1BB agonist, an OX40 agonist, and combinations thereof. In preferred embodiments, the compositions described herein provide a combination of a PD-1 inhibitor with a BTK inhibitor, or methods of using a combination of a PD-1 inhibitor with a BTK inhibitor. In some embodiments, the PD-1 inhibitors provided herein are selective for PD-1, in that the compounds bind or interact with PD-1 at substantially lower concentrations than they bind or interact with other receptors.

[1462] In some embodiments, the compositions and methods described include a PD-1 inhibitor that binds human PD-1 with a K_{D} of about 100 pM or lower, binds human PD-1 with a K_{D} of about 90 pM or lower, binds human PD-1 with a K_{D} of about 80 pM or lower, binds human PD-1 with a K_{D} of about 70 pM or lower, binds human PD-1 with a K_{D} of about 60 pM or lower, binds human PD-1 with a K_{D} of about 50 pM or lower, binds human PD-1 with a K_{D} of about 40 pM or lower, binds human PD-1 with a K_{D} of about 30 pM or lower, binds human PD-1 with a K_{D} of about 20 pM or lower, binds human PD-1 with a K_{D} of about 10 pM or lower, or binds human PD-1 with a K_{D} of about 1 pM or lower.

[1463] In some embodiments, the compositions and methods described include a PD-1 inhibitor that binds to human PD-1 with a k_{assoc} of about 7.5×10⁵ l/M·s or faster, binds to human PD-1 with a k₁c of about 7.5×10⁵ l/M·s or faster, binds to human PD-1 with a k_{assoc} of about 8×10⁵ l/M·s or faster, binds to human PD-1 with a k_{assoc} of about 8.5×10⁵ l/M·s or faster, binds to human PD-1 with a k_{assoc} of about 9×10⁵ l/M·s or faster, binds to human PD-1 with a k_{assoc} of about 9.5×10⁵ l/M·s or faster, or binds to human PD-1 with a k_{assoc} of about 1×10⁶ l/M·s or faster.

[1464] In some embodiments, the compositions and methods described include a PD-1 inhibitor that binds to human PD-1 with a k_{dissoc} of about 2×10⁻⁵ l/s or slower, binds to human PD-1 with a k_{dissoc} of about 2.1×10⁻⁵ l/s or slower, binds to human PD-1 with a k_{dissoc} of about 2.2×10⁻⁵ l/s or slower, binds to human PD-1 with a k_{dissoc} of about 2.3×10⁻⁵ l/s or slower, binds to human PD-1 with a k_{dissoc} so of about 2.4×10⁻⁵ l/s or slower, binds to human PD-1 with a k_{dissoc} of about 2.5×10⁻⁵ l/s or slower, binds to human PD-1 with a k_{dissoc} of about 2.6×10⁻⁵ l/s or slower or binds to human PD-1 with a k_{dissoc} of about 2.7×10⁻⁵ l/s or slower, binds to human PD-1 with a k_{dissoc} of about 2.8×10⁻⁵ l/s or slower, binds to human PD-1 with a k_{dissoc} of about 2.9×10⁵ l/s or slower, or binds to human PD-1 with a k_{dissoc} of about 3×10⁻⁵ l/s or slower.

[1465] In some embodiments, the compositions and methods described include a PD-1 inhibitor that blocks or inhibits binding of human PD-L1 or human PD-L2 to human PD-1 with an IC₅₀ of about 10 nM or lower, blocks or inhibits binding of human PD-L1 or human PD-L2 to human PD-1 with an IC₅₀ of about 9 nM or lower, blocks or inhibits binding of human PD-L1 or human PD-L2 to human PD-1 with an IC₅₀ of about 8 nM or lower, blocks or inhibits binding of human PD-L1 or human PD-L2 to human PD-1 with an IC₅₀ of about 7 nM or lower, blocks or inhibits binding of human PD-L1 or human PD-L2 to human PD-1 with an IC₅₀ of about 6 nM or lower, blocks or inhibits binding of human PD-L1 or human PD-L2 to human PD-1 with an IC₅₀ of about 5 nM or lower, blocks or inhibits binding of human PD-L1 or human PD-L2 to human PD-1 with an IC₅₀ of about 4 nM or lower, blocks or inhibits binding of human PD-L1 or human PD-L2 to human PD-1 with an IC₅₀ of about 3 nM or lower, blocks or inhibits binding of human PD-L or human PD-L2 to human PD-1 with an IC₅₀ of about 2 nM or lower, or blocks or inhibits binding of human PD-L or human PD-L2 to human PD-1 with an IC₅s of about 1 nM or lower.

[1466] In an embodiment, an anti-PD-1 antibody comprises nivolumab (also known as OPDIVO and commercially available from Bristol-Myers Squibb Co.), or biosimilars, antigen-binding fragments, conjugates, or variants thereof. Nivolumab is referred to as 5C4 in International Patent Publication No. WO 2006/121168. Nivolumab is assigned Chemical Abstracts Service (CAS) registry number 946414-94-4 and is also known as BMS-936558, MDX-1106 or ONO-4538. Nivolumab is a fully human IgG4 antibody blocking the PD-1 receptor. The clinical safety and efficacy of nivolumab in various forms of cancer has been described in Wang et al., Cancer Immunol Res. 2014, 2, 846-56; Page et al., Ann. Rev. Med., 2014, 65, 185-202; and Weber, et al., J. Clin. Oncology, 2013, 31, 4311-4318. The nivolumab monoclonal antibody includes a heavy chain given by SEQ ID NO:379 and a light chain given by SEQ ID NO:380. Nivolumab has intra-heavy chain disulfide linkages at 22-96,140-196, 254-314, 360-418, 22″-96″, 140″-196″, 254″-314″, and 360″-418″; intra-light chain disulfide linkages at 23′-88′, 134′-194′, 23′″-88′″, and 134′″-194′″; inter-heavy-light chain disulfide linkages at 127-214′, 127″-214′″, inter-heavy-heavy chain disulfide linkages at 219-219″ and 222-222″; and N-glycosylation sites (H CH₂ 84.4) at 290, 290″. In an embodiment, the anti-PD-1 antibody is an immunoglobulin G4 kappa, anti-(human CD274) antibody. In an embodiment, an anti-PD-1 antibody comprises heavy and light chains having the sequences shown in SEQ ID NO:379 and SEQ ID NO:380, respectively, or antigen binding fragments, Fab fragments, single-chain variable fragments (scFv), variants, or conjugates thereof. In an embodiment, an anti-PD-1 antibody comprises heavy and light chains that are each at least 99% identical to the sequences shown in SEQ ID NO:379 and SEQ ID NO:380, respectively. In an embodiment, an anti-PD-1 antibody comprises heavy and light chains that are each at least 98% identical to the sequences shown in SEQ ID NO:379 and SEQ ID NO:380, respectively. In an embodiment, an anti-PD-1 antibody comprises heavy and light chains that are each at least 97% identical to the sequences shown in SEQ ID NO:379 and SEQ ID NO:380, respectively. In an embodiment, an anti-PD-1 antibody comprises heavy and light chains that are each at least 96% identical to the sequences shown in SEQ ID NO:379 and SEQ ID NO:380, respectively. In an embodiment, an anti-PD-1 antibody comprises heavy and light chains that are each at least 95% identical to the sequences shown in SEQ ID NO:379 and SEQ ID NO:380, respectively.

[1467] In an embodiment, the anti-PD-1 antibody is an anti-PD-1 biosimilar monoclonal antibody approved by drug regulatory authorities with reference to nivolumab. In an embodiment, the biosimilar comprises an anti-PD-1 antibody comprising an amino acid sequence which has at least 97% sequence identity, e.g., 97%, 98%, 99% or 100% sequence identity, to the amino acid sequence of a reference medicinal product or reference biological product and which comprises one or more post-translational modifications as compared to the reference medicinal product or reference biological product, wherein the reference medicinal product or reference biological product is nivolumab. In some embodiments, the one or more post-translational modifications are selected from one or more of: glycosylation, oxidation, deamidation, and truncation. In some embodiments, the biosimilar is an anti-PD-1 antibody authorized or submitted for authorization, wherein the anti-PD-1 antibody is provided in a formulation which differs from the formulations of a reference medicinal product or reference biological product, wherein the reference medicinal product or reference biological product is nivolumab. The anti-PD-1 antibody may be authorized by a drug regulatory authority such as the U.S. FDA and/or the European Union's EMA. In some embodiments, the biosimilar is provided as a composition which further comprises one or more excipients, wherein the one or more excipients are the same or different to the excipients comprised in a reference medicinal product or reference biological product, wherein the reference medicinal product or reference biological product is nivolumab. In some embodiments, the biosimilar is provided as a composition which further comprises one or more excipients, wherein the one or more excipients are the same or different to the excipients comprised in a reference medicinal product or reference biological product, wherein the reference medicinal product or reference biological product is nivolumab.

[1468] In an embodiment, the anti-PD-1 antibody comprises the heavy and light chain CDRs or variable regions (VRs) of nivolumab. In one embodiment, the anti-PD-1 antibody heavy chain variable region (V_{H}) comprises the sequence shown in SEQ ID NO:80, and the anti-PD-1 antibody light chain variable region (V_{L}) comprises the sequence shown in SEQ ID NO:81. In an embodiment, an anti-PD-1 antibody comprises V_{H} and V_{L} regions that are each at least 99% identical to the sequences shown in SEQ ID NO:381 and SEQ ID NO:382, respectively. In an embodiment, an anti-PD-1 antibody comprises V_{H} and V_{L} regions that are each at least 98% identical to the sequences shown in SEQ ID NO:381 and SEQ ID NO:382, respectively. In an embodiment, an anti-PD-1 antibody comprises V_{H} and V_{L} regions that are each at least 97% identical to the sequences shown in SEQ ID NO:381 and SEQ ID NO:382, respectively. In an embodiment, an anti-PD-1 antibody comprises V_{H} and V_{L} regions that are each at least 96% identical to the sequences shown in SEQ ID NO:381 and SEQ ID NO:382, respectively. In an embodiment, an anti-PD-1 antibody comprises V_{H} and V_{L} regions that are each at least 95% identical to the sequences shown in SEQ ID NO:381 and SEQ ID NO:382, respectively. In an alternative embodiment, the antibody comprises V_{H} and/or V_{L} regions having the amino acid sequences set forth in SEQ ID NO:381 and/or SEQ ID NO:382, respectively.

[1469] In an embodiment, the anti-PD-1 antibody comprises heavy chain CDR1, CDR2 and CDR3 domains having the sequences set forth in SEQ ID NO:383, SEQ ID NO:384, and SEQ ID NO:385, respectively, and light chain CDR1, CDR2 and CDR3 domains having the sequences set forth in SEQ ID NO:386, SEQ ID NO:387, and SEQ ID NO:388, respectively.

[1470] In an embodiment, an anti-PD-1 antibody comprises a heavy chain that comprises CDR1, CDR2 and CDR3 domains that are each at least 95% identical to the sequences shown in SEQ ID NO:383, SEQ ID NO:384, and SEQ ID NO:385, respectively. In an embodiment, an anti-PD-1 antibody comprises a heavy chain that comprises CDR1, CDR2 and CDR3 domains that are each at least 90% identical to the sequences shown in SEQ ID NO:383, SEQ ID NO:384, and SEQ ID NO:385, respectively. In an embodiment, an anti-PD-1 antibody comprises a heavy chain that comprises CDR1, CDR2 and CDR3 domains that are each at least 85% identical to the sequences shown in SEQ ID NO:383, SEQ ID NO:384, and SEQ ID NO:385, respectively. In an embodiment, an anti-PD-1 antibody comprises a heavy chain that comprises CDR1, CDR2 and CDR3 domains that are each at least 80% identical to the sequences shown in SEQ ID NO:383, SEQ ID NO:384, and SEQ ID NO:385, respectively. In another embodiment, the antibody competes for binding with, and/or binds to the same epitope on PD-1 as the aforementioned antibodies.

[1471] In an embodiment, an anti-PD-1 antibody comprises a light chain that comprises CDR1, CDR2 and CDR3 domains that are each at least 95% identical to the sequences shown in SEQ ID NO:386, SEQ ID NO:387, and SEQ ID NO:388, respectively. In an embodiment, an anti-PD-1 antibody comprises a light chain that comprises CDR1, CDR2 and CDR3 domains that are each at least 90% identical to the sequences shown in SEQ ID NO:386, SEQ ID NO:387, and SEQ ID NO:388, respectively. In an embodiment, an anti-PD-1 antibody comprises a light chain that comprises CDR1, CDR2 and CDR3 domains that are each at least 85% identical to the sequences shown in SEQ ID NO:386, SEQ ID NO:387, and SEQ ID NO:388, respectively. In an embodiment, an anti-PD-1 antibody comprises a light chain that comprises CDR1, CDR2 and CDR3 domains that are each at least 80% identical to the sequences shown in SEQ ID NO:386, SEQ ID NO:387, and SEQ ID NO:388, respectively. In another embodiment, the antibody competes for binding with, and/or binds to the same epitope on PD-1 as the aforementioned antibodies.

[1472] In an embodiment, the anti-PD-1 antibody is an antibody disclosed and/or prepared according to U.S. Pat. No. 8,008,449 or U.S. Patent Application Publication Nos. 2009/0217401 A1 or 2013/0133091 A1, the disclosures of which are specifically incorporated by reference herein. For example, in an embodiment, the monoclonal antibody includes 5C4 (referred to herein as nivolumab), 17D8, 2D3, 4H1, 4A11, 7D3, and 5F4, described in U.S. Pat. No. 8,008,449, the disclosures of which are hereby incorporated by reference. The PD-1 antibodies 17D8, 2D3, 4H1, 5C4, and 4A11, are all directed against human PD-1, bind specifically to PD-1 and do not bind to other members of the CD28 family. The sequences and CDR regions for these antibodies are provided in U.S. Pat. No. 8,008,449, in particular in FIG. 1 through FIG. 12 therein; the disclosures of which are incorporated by reference herein.

[1473] The anti-PD-1 antibody nivolumab may be prepared by the following procedure, as described in U.S. Pat. No. 8,008,449. Immunization protocols utilized as antigen both (i) a recombinant fusion protein comprising the extracellular portion of PD-1 and (ii) membrane bound full-length PD-1. Both antigens were generated by recombinant transfection methods in a CHO cell line. Fully human monoclonal antibodies to PD-1 were prepared using the HCo7 strain of HuMab transgenic mice and the KM strain of transgenic transchromosomic mice, each of which express human antibody genes. In each of these mouse strains, the endogenous mouse kappa light chain gene has been homozygously disrupted as described in Chen, et al. EMBO J. 1993, 12, 811-820 and the endogenous mouse heavy chain gene has been homozygously disrupted as described in Example 1 of International Patent Publication No. WO 01/09187. Each of these mouse strains carries a human kappa light chain transgene, KCo5, as described in Fishwild, et al. Nat. Biotechnology 1996, 14, 845-851. The HCo7 strain carries the HCo7 human heavy chain transgene as described in U.S. Pat. Nos. 5,545,806; 5,625,825; and 5,545,807. The KM strain contains the SC20 transchromosome as described in International Patent Publication No. WO 02/43478. To generate fully human monoclonal antibodies to PD-1, HuMab mice and KM Mice™ were immunized with purified recombinant PD-1 fusion protein and PD-1-transfected CHO cells as antigen. General immunization schemes for HuMab mice are described in Lonberg, et al., Nature 1994, 368, 856-859; Fishwild, et al., Nat. Biotechnology 1996, 14, 845-851, and International Patent Publication No. WO 98/24884. The mice were 6-16 weeks of age upon the first infusion of antigen. A purified recombinant preparation (5-50 μg) of PD-1 fusion protein antigen and 5-10×10⁶ cells were used to immunize the HuMab mice and KM Mice™ intraperitonealy, subcutaneously (Sc) or via footpad injection. Transgenic mice were immunized twice with antigen in complete Freund's adjuvant or Ribi adjuvant IP, followed by 3-21 days IP (up to a total of 11 immunizations) with the antigen in incomplete Freund's or Ribi adjuvant. The immune response was monitored by retroorbital bleeds. The plasma was screened by ELISA (as described below), and mice with sufficient titers of anti-PD-1 human immunoglobulin were used for fusions. Mice were boosted intravenously with antigen 3 days before sacrifice and removal of the spleen. Typically, 10-35 fusions for each antigen were performed. Several dozen mice were immunized for each antigen. To select HuMab or KM Mice™ producing antibodies that bound PD-1, sera from immunized mice were tested by ELISA as described by Fishwild, et al., Nat. Biotechnology 1996, 14, 845-851. Briefly, microtiter plates were coated with purified recombinant PD-1 fusion protein from transfected CHO cells at 1-2 μg/ml in PBS, 100 μL/wells incubated at 4° C. overnight then blocked with 200 μL/well of 5% fetal bovine serum in PBS/Tween (0.05%). Dilutions of sera from PD-1-immunized mice were added to each well and incubated for 1-2 hours at ambient temperature. The plates were washed with PBS/Tween and then incubated with a goat-anti-human IgG polyclonal antibody conjugated with horseradish peroxidase (HRP) for 1 hour at room temperature. After washing, the plates were developed with ABTS substrate (Sigma, A-1888, 0.22 mg/ml) and analyzed by spectrophotometer at OD 415-495. Mice that developed the highest titers of anti-PD-1 antibodies were used for fusions. Fusions were performed as described below and hybridoma supernatants were tested for anti-PD-1 activity by ELISA. The mouse splenocytes, isolated from the HuMab or KM mice, were fused to a mouse myeloma cell line either using PEG based upon standard protocols or electric field based electrofusion using a Cyto Pulse large chamber cell fusion electroporator (Cyto Pulse Sciences, Inc., Glen Burnie, Md.). The resulting hybridomas were then screened for the production of antigen-specific antibodies. Single cell suspensions of splenocytes from immunized mice were fused to one-fourth the number of SP2/0 nonsecreting mouse myeloma cells (ATCC, CRL 1581) with 50% PEG (Sigma). Cells were plated at approximately 1×105/well in flat bottom microtiter plate, followed by about two week incubation in selective medium containing 10% fetal bovine serum, 10% P388D1 (ATCC, CRL TIB-63) conditioned medium, 3-5% origen (IGEN) in DMEM (Mediatech, CRL 10013, with high glucose, L-glutamine and sodium pyruvate) plus 5 mM HEPES, 0.055 mM 2-mercaptoethanol, 50 mg/ml gentamycin and 1×HAT (Sigma, CRL P-7185). After 1-2 weeks, cells were cultured in medium in which the HAT was replaced with HT. Individual wells were then screened by ELISA (described above) for human anti-PD-1 monoclonal IgG antibodies. Once extensive hybridoma growth occurred, medium was monitored usually after 10-14 days. The antibody-secreting hybridomas were replated, screened again and, if still positive for human IgG, anti-PD-1 monoclonal antibodies were subcloned at least twice by limiting dilution. The stable subclones were then cultured in vitro to generate small amounts of antibody in tissue culture medium for further characterization. The antibody nivolumab may be produced in this manner, or by other known means given the disclosure of the amino acid sequences herein.

[1474] In another embodiment, the anti-PD-1 antibody comprises pembrolizumab (also known as KEYTRUDA), which is commercially available from Merck, or antigen-binding fragments, conjugates, or variants thereof. Pembrolizumab is assigned CAS registry number 1374853-91-4 and is also known as lambrolizumab, MK-3475, and SCH-900475. The structure, properties, uses, and preparation of pembrolizumab are described in International Patent Publication No. WO 2008/156712 A1, U.S. Pat. No. 8,354,509 and U.S. Patent Application Publication Nos. US 2010/0266617 A1, US 2013/0108651 A1, and US 2013/0109843 A2, the disclosures of which are incorporated herein by reference. Pembrolizumab has an immunoglobulin G4, anti-(human protein PDCD1 (programmed cell death 1)) (human-Mus musculus monoclonal heavy chain), disulfide with human-Mus musculus monoclonal light chain, dimer structure. The structure of pembrolizumab may also be described as immunoglobulin G4, anti-(human programmed cell death 1); humanized mouse monoclonal [228-L-proline(H10-S>P)]γ⁴ heavy chain (134-218′)-disulfide with humanized mouse monoclonal κ light chain dimer (226-226″:229-229″)-bisdisulfide. The clinical safety and efficacy of pembrolizumab in various forms of cancer is described in Fuerst, Oncology Times, 2014, 36, 35-36; Robert, et al., Lancet, 2014, 384, 1109-17; and Thomas, et al., Exp. Opin. Biol. Ther., 2014, 14, 1061-1064. In an embodiment, the pembrolizumab monoclonal antibody includes a heavy chain given by SEQ ID NO:389 and a light chain given by SEQ ID NO:390, and includes the following disulfide bridges: 22-96, 22″-96″, 23′-92′, 23′″-92′″, 134-218′, 134″-218′″, 138′-198′, 138′″-198′″, 147-203, 147″-203″, 226-226″, 229-229″, 261-321, 261″-321″, 367-425, and 367′-425″, and the following glycosylation sites (N): Asn-297 and Asn-297″. Pembrolizumab is an IgG4/kappa isotype with a stabilizing S228P mutation in the Fc region; insertion of this mutation in the IgG4 hinge region prevents the formation of half molecules typically observed for IgG4 antibodies. Pembrolizumab is heterogeneously glycosylated at Asn297 within the Fc domain of each heavy chain, yielding a molecular weight of approximately 149 kDa for the intact antibody. The dominant glycoform of pembrolizumab is the fucosylated agalacto diantennary glycan form (G0F).

[1475] In an embodiment, an anti-PD-1 antibody comprises heavy and light chains having the sequences shown in SEQ ID NO:389 and SEQ ID NO:390, respectively, or antigen binding fragments and variants thereof. In an embodiment, an anti-PD-1 antibody comprises heavy and light chains that are each at least 99% identical to the sequences shown in SEQ ID NO:389 and SEQ ID NO:390, respectively, or antigen binding fragments and variants thereof. In an embodiment, an anti-PD-1 antibody comprises heavy and light chains that are each at least 98% identical to the sequences shown in SEQ ID NO:389 and SEQ ID NO:390, respectively, or antigen binding fragments and variants thereof. In an embodiment, an anti-PD-1 antibody comprises heavy and light chains that are each at least 97% identical to the sequences shown in SEQ ID NO:389 and SEQ ID NO:390, respectively, or antigen binding fragments and variants thereof. In an embodiment, an anti-PD-1 antibody comprises heavy and light chains that are each at least 96% identical to the sequences shown in SEQ ID NO:389 and SEQ ID NO:390, respectively, or antigen binding fragments and variants thereof. In an embodiment, an anti-PD-1 antibody comprises heavy and light chains that are each at least 95% identical to the sequences shown in SEQ ID NO:389 and SEQ ID NO:390, respectively, or antigen binding fragments and variants thereof.

[1476] In an embodiment, the anti-PD-1 antibody is an anti-PD-1 biosimilar monoclonal antibody approved by drug regulatory authorities with reference to pembrolizumab. In an embodiment, the biosimilar comprises an anti-PD-1 antibody comprising an amino acid sequence which has at least 97% sequence identity, e.g., 97%, 98%, 99% or 100% sequence identity, to the amino acid sequence of a reference medicinal product or reference biological product and which comprises one or more post-translational modifications as compared to the reference medicinal product or reference biological product, wherein the reference medicinal product or reference biological product is pembrolizumab. In some embodiments, the one or more post-translational modifications are selected from one or more of: glycosylation, oxidation, deamidation, and truncation. In some embodiments, the biosimilar is an anti-PD-1 antibody authorized or submitted for authorization, wherein the anti-PD-1 antibody is provided in a formulation which differs from the formulations of a reference medicinal product or reference biological product, wherein the reference medicinal product or reference biological product is pembrolizumab. The anti-PD-1 antibody may be authorized by a drug regulatory authority such as the U.S. FDA and/or the European Union's EMA. In some embodiments, the biosimilar is provided as a composition which further comprises one or more excipients, wherein the one or more excipients are the same or different to the excipients comprised in a reference medicinal product or reference biological product, wherein the reference medicinal product or reference biological product is pembrolizumab. In some embodiments, the biosimilar is provided as a composition which further comprises one or more excipients, wherein the one or more excipients are the same or different to the excipients comprised in a reference medicinal product or reference biological product, wherein the reference medicinal product or reference biological product is pembrolizumab.

[1477] In an embodiment, the anti-PD-1 antibody comprises the heavy and light chain CDRs or VRs of pembrolizumab. In one embodiment, the anti-PD-1 antibody V_{H} region comprises the sequence shown in SEQ ID NO:391, and the anti-PD-1 antibody V_{L} region comprises the sequence shown in SEQ ID NO:392. In an embodiment, an anti-PD-1 antibody comprises V_{H} and V_{L} regions that are each at least 99% identical to the sequences shown in SEQ ID NO:391 and SEQ ID NO:392, respectively. In an embodiment, an anti-PD-1 antibody comprises V_{H} and V_{L} regions that are each at least 98% identical to the sequences shown in SEQ ID NO:391 and SEQ ID NO:392, respectively. In an embodiment, an anti-PD-1 antibody comprises V_{H} and V_{L} regions that are each at least 97% identical to the sequences shown in SEQ ID NO:391 and SEQ ID NO:392, respectively. In an embodiment, an anti-PD-1 antibody comprises V_{H} and V_{L} regions that are each at least 96% identical to the sequences shown in SEQ ID NO:391 and SEQ ID NO:392, respectively. In an embodiment, an anti-PD-1 antibody comprises V_{H} and V_{L} regions that are each at least 95% identical to the sequences shown in SEQ ID NO:391 and SEQ ID NO:392, respectively. In an alternative embodiment, the antibody comprises V_{H} and/or V_{L} regions having the amino acid sequences set forth in SEQ ID NO:391 and/or SEQ ID NO:392, respectively.

[1478] In an embodiment, the anti-PD-1 antibody comprises heavy chain CDR1, CDR2 and CDR3 domains having the sequences set forth in SEQ ID NO:393, SEQ ID NO:394, and SEQ ID NO:395, respectively, and light chain CDR1, CDR2 and CDR3 domains having the sequences set forth in SEQ ID NO:396, SEQ ID NO:397, and SEQ ID NO:398, respectively.

[1479] In an embodiment, an anti-PD-1 antibody comprises a heavy chain that comprises CDR1, CDR2 and CDR3 domains that are each at least 95% identical to the sequences shown in SEQ ID NO:393, SEQ ID NO:394, and SEQ ID NO:395, respectively. In an embodiment, an anti-PD-1 antibody comprises a heavy chain that comprises CDR1, CDR2 and CDR3 domains that are each at least 90% identical to the sequences shown in SEQ ID NO:393, SEQ ID NO:394, and SEQ ID NO:395, respectively. In an embodiment, an anti-PD-1 antibody comprises a heavy chain that comprises CDR1, CDR2 and CDR3 domains that are each at least 85% identical to the sequences shown in SEQ ID NO:393, SEQ ID NO:394, and SEQ ID NO:395, respectively. In an embodiment, an anti-PD-1 antibody comprises a heavy chain that comprises CDR1, CDR2 and CDR3 domains that are each at least 80% identical to the sequences shown in SEQ ID NO:393, SEQ ID NO:394, and SEQ ID NO:395, respectively. In another embodiment, the antibody competes for binding with, and/or binds to the same epitope on PD-1 as the aforementioned antibodies.

[1480] In an embodiment, an anti-PD-1 antibody comprises a light chain that comprises CDR1, CDR2 and CDR3 domains that are each at least 95% identical to the sequences shown in SEQ ID NO:396, SEQ ID NO:397, and SEQ ID NO:398, respectively. In an embodiment, an anti-PD-1 antibody comprises a light chain that comprises CDR1, CDR2 and CDR3 domains that are each at least 90% identical to the sequences shown in SEQ ID NO:396, SEQ ID NO:397, and SEQ ID NO:398, respectively. In an embodiment, an anti-PD-1 antibody comprises a light chain that comprises CDR1, CDR2 and CDR3 domains that are each at least 85% identical to the sequences shown in SEQ ID NO:396, SEQ ID NO:397, and SEQ ID NO:398, respectively. In an embodiment, an anti-PD-1 antibody comprises a light chain that comprises CDR1, CDR2 and CDR3 domains that are each at least 80% identical to the sequences shown in SEQ ID NO:396, SEQ ID NO:397, and SEQ ID NO:398, respectively. In another embodiment, the antibody competes for binding with, and/or binds to the same epitope on PD-1 as the aforementioned antibodies.

[1481] In an embodiment, the anti-PD-1 antibody is an antibody disclosed in U.S. Pat. No. 8,354,509 or U.S. Patent Application Publication Nos. 2010/0266617 A1, 2013/0108651 A1, 2013/0109843 A2, the disclosures of which are specifically incorporated by reference herein.

[1482] In an embodiment, the anti-PD-1 antibody is pidilizumab, which is also known as CT-011 (CureTech Ltd.), and which is disclosed in U.S. Pat. No. 8,686,119 B2, the disclosures of which are specifically incorporated by reference herein. The efficacy of pidilizumab in the treatment of cancers, such as hematological malignancies, is described in Berger, et al., Clin. Cancer Res. 2008, 14, 3044-51. The pidilizumab monoclonal antibody includes a heavy chain given by SEQ ID NO:399 and a light chain given by SEQ ID NO:400. Pidilizumab has intra-heavy chain disulfide linkages at 22-96, 144-200, 261-321, 367-425, 22″-96″, 144″-200″, 261″-321″, and 367″-425″; intra-light chain disulfide linkages at 23′-87, 133′-193′, 23′″-87′″, and 133′″-193′″; inter-heavy-light chain disulfide linkages at 220-213′ and 220″-213′″, inter-heavy-heavy chain disulfide linkages at 226-226″ 229-229″; and N-glycosylation sites (H CH₂ 84.4) at 297, 297″.

[1483] In an embodiment, the anti-PD-1 antibody is an immunoglobulin G1 kappa, anti-(human CD274) humanized monoclonal antibody. In an embodiment, an anti-PD-1 antibody comprises heavy and light chains having the sequences shown in SEQ ID NO:399 and SEQ ID NO:400, respectively, or antigen binding fragments, variants, or conjugates thereof. In an embodiment, an anti-PD-1 antibody comprises heavy and light chains that are each at least 99% identical to the sequences shown in SEQ ID NO:399 and SEQ ID NO:400, respectively. In an embodiment, an anti-PD-1 antibody comprises heavy and light chains that are each at least 98% identical to the sequences shown in SEQ ID NO:399 and SEQ ID NO:400, respectively. In an embodiment, an anti-PD-1 antibody comprises heavy and light chains that are each at least 97% identical to the sequences shown in SEQ ID NO:399 and SEQ ID NO:400, respectively. In an embodiment, an anti-PD-1 antibody comprises heavy and light chains that are each at least 96% identical to the sequences shown in SEQ ID NO:399 and SEQ ID NO:400, respectively. In an embodiment, an anti-PD-1 antibody comprises heavy and light chains that are each at least 95% identical to the sequences shown in SEQ ID NO:399 and SEQ ID NO:400, respectively.

[1484] In an embodiment, the anti-PD-1 antibody is an anti-PD-1 biosimilar monoclonal antibody approved by drug regulatory authorities with reference to pidilizumab. In an embodiment, the biosimilar comprises an anti-PD-1 antibody comprising an amino acid sequence which has at least 97% sequence identity, e.g., 97%, 98%, 99% or 100% sequence identity, to the amino acid sequence of a reference medicinal product or reference biological product and which comprises one or more post-translational modifications as compared to the reference medicinal product or reference biological product, wherein the reference medicinal product or reference biological product is pidilizumab. In some embodiments, the one or more post-translational modifications are selected from one or more of: glycosylation, oxidation, deamidation, and truncation. In some embodiments, the biosimilar is an anti-PD-1 antibody authorized or submitted for authorization, wherein the anti-PD-1 antibody is provided in a formulation which differs from the formulations of a reference medicinal product or reference biological product, wherein the reference medicinal product or reference biological product is pidilizumab. The anti-PD-1 antibody may be authorized by a drug regulatory authority such as the U.S. FDA and/or the European Union's EMA. In some embodiments, the biosimilar is provided as a composition which further comprises one or more excipients, wherein the one or more excipients are the same or different to the excipients comprised in a reference medicinal product or reference biological product, wherein the reference medicinal product or reference biological product is pidilizumab. In some embodiments, the biosimilar is provided as a composition which further comprises one or more excipients, wherein the one or more excipients are the same or different to the excipients comprised in a reference medicinal product or reference biological product, wherein the reference medicinal product or reference biological product is pidilizumab.

[1485] In an embodiment, an anti-PD-L1 antibody comprises V_{H} and V_{L} regions that are each at least 99% identical to the sequences shown in SEQ ID NO:401 and SEQ ID NO:402, respectively. In an embodiment, an anti-PD-L1 antibody comprises V_{H} and V_{L} regions that are each at least 98% identical to the sequences shown in SEQ ID NO:401 and SEQ ID NO:402, respectively. In an embodiment, an anti-PD-L1 antibody comprises V_{H} and V_{L} regions that are each at least 97% identical to the sequences shown in SEQ ID NO:401 and SEQ ID NO:402, respectively. In an embodiment, an anti-PD-L1 antibody comprises V_{H} and V_{L} regions that are each at least 96% identical to the sequences shown in SEQ ID NO:401 and SEQ ID NO:402, respectively. In an embodiment, an anti-PD-L1 antibody comprises V_{H} and V_{L} regions that are each at least 95% identical to the sequences shown in SEQ ID NO:401 and SEQ ID NO:402, respectively.

[1486] In an embodiment, anti-PD-1 antibodies and other PD-1 inhibitors include those described in U.S. Pat. Nos. 8,287,856, 8,580,247, and 8,168,757 and U.S. Patent Application Publication Nos. 2009/0028857 A1, 2010/0285013 A1, 2013/0022600 A1, and 2011/0008369 A1, the teachings of which are hereby incorporated by reference. In another embodiment, antibodies that compete with any of these antibodies for binding to PD-1 are also included. In another embodiment, the anti-PD-1 antibody is an antibody disclosed in U.S. Pat. No. 8,735,553 B1, the disclosures of which are incorporated herein by reference.

[1487] In an embodiment, the anti-PD-1 antibody is a commercially-available monoclonal antibody, such as anti-m-PD-1 clones J43 (Cat # BE0033-2) and RMP1-14 (Cat #BE0146) (Bio X Cell, Inc., West Lebanon, N.H., USA). A number of commercially-available anti-PD-1 antibodies are known to one of ordinary skill in the art.

[1488] Monoclonal antibodies that inhibit or block PD-1 can be prepared by procedures known to those of ordinary knowledge and skill in the art, e.g., by injecting test subjects with PD-1 antigen and then isolating hybridomas expressing antibodies having the desired sequence or functional characteristics. DNA encoding the monoclonal antibodies is readily isolated and sequenced using conventional procedures (e.g., by using oligonucleotide probes that are capable of binding specifically to genes encoding the heavy and light chains of the monoclonal antibodies). The hybridoma cells serve as a preferred source of such DNA. Once isolated, the DNA may be placed into expression vectors, which are then transfected into host cells such as E. coli cells, simian COS cells, Chinese hamster ovary (CHO) cells, myeloma cells, or other suitable cells that do not otherwise produce immunoglobulin protein, to obtain the synthesis of monoclonal antibodies in the recombinant host cells. The details of recombinant production of specific antibodies may be found in the references cited in the foregoing, the disclosures of which are incorporated by reference herein. Monoclonal antibodies that inhibit PD-1 can be prepared by standard molecular biology methods using the sequences provided herein by reverse translation and insertion into appropriate DNA or RNA vectors.

[1489] In an embodiment, the PD-1 inhibitor may be a small molecule or a peptide, or a peptide derivative, such as those described in U.S. Pat. Nos. 8,907,053; 9,096,642; and 9,044,442 and U.S. Patent Application Publication No. US 2015/0087581; 1,2,4-oxadiazole compounds and derivatives such as those described in U.S. Patent Application Publication No. 2015/0073024; cyclic peptidomimetic compounds and derivatives such as those described in U.S. Patent Application Publication No. US 2015/0073042; cyclic compounds and derivatives such as those described in U.S. Patent Application Publication No. US 2015/0125491; 1,3,4-oxadiazole and 1,3,4-thiadiazole compounds and derivatives such as those described in International Patent Application Publication No. WO 2015/033301; peptide-based compounds and derivatives such as those described in International Patent Application Publication Nos. WO 2015/036927 and WO 2015/04490, or a macrocyclic peptide-based compounds and derivatives such as those described in U.S. Patent Application Publication No. US 2014/0294898; the disclosures of each of which are hereby incorporated by reference in their entireties.

[1490] The anti-PD-1 antibody sequences discussed and referenced in some of the foregoing embodiments are summarized in Table 16.

TABLE 16
Anti-PD-1 antibody amino acid sequences.

| Identifier | Sequence (One-Letter Amino Acid Symbols) | |
|---|---|---|
| SEQ ID NO: 379 | QVQLVESGGG VVQPGRSLRL DCKASGITFS NSGMHWVRQA PGKGLEWVAV IWYDGSKRYY | 60 |
| nivolumab | ADSVKGRFTI SRDNSKNTLF LQMNSLRAED TAVYYCATND DYWGQGTLVT VSSASTKGPS | 120 |
| heavy chain | VFPLAPCSRS TSESTAALGC LVKDYFPEPV TVSWNSGALT SGVHTFPAVL QSSGLYSLSS | 180 |
| | VVTVPSSSLG TKTYTCNVDH KPSNTKVDKR VESKYGPPCP PCPAPEFLGG PSVFLFPPKP | 240 |
| | KDTLMISRTP EVTCVVVDVS QEDPEVQFNW YVDGVEVHNA KTKPREEQFN STYRVVSVLT | 300 |
| | VLHQDWLNGK EYKCKVSNKG LPSSIEKTIS KAKGQPREPQ VYTLPPSQEE MTKNQVSLTC | 360 |
| | LVKGFYPSDI AVEWESNGQP ENNYKTTPPV LDSDGSFFLY SRLTVDKSRW QEGNVFSCSV | 420 |
| | MHEALHNHYT QKSLSLSLGK | 440 |
| SEQ ID NO: 380 | EIVLTQSPAT LSLSPGERAT LSCRASQSVS SYLAWYQQKP GQAPRLLIYD ASNRATGIPA | 60 |
| nivolumab | RFSGSGSGTD FTLTISSLEP EDFAVYYCQQ SSNWPRTFGQ GTKVEIKRTV AAPSVFIFPP | 120 |
| light chain | SDEQLKSGTA SVVCLLNNFY PREAKVQWKV DNALQSGNSQ ESVTEQDSKD STYSLSSTLT | 180 |
| | LSKADYEKHK VYACEVTHQG LSSPVTKSFN RGEC | 214 |
| SEQ ID NO: 381 | QVQLVESGGG VVQPGRSLRL DCKASGITFS NSGMHWVRQA PGKGLEWVAV IWYDGSKRYY | 60 |
| nivolumab | ADSVKGRFTI SRDNSKNTLF LQMNSLRAED TAVYYCATND DYWGQGTLVT VSS | 113 |
| variable heavy | | |
| chain | | |
| SEQ ID NO: 382 | EIVLTQSPAT LSLSPGERAT LSCRASQSVS SYLAWYQQKP GQAPRLLIYD ASNRATGIPA | 60 |
| nivolumab | RFSGSGSGTD FTLTISSLEP EDFAVYYCQQ SSNWPRTFGQ GTKVEIK | 107 |
| variable light | | |
| chain | | |
| SEQ ID NO: 383 | NSGMH | 5 |
| nivolumab | | |
| heavy chain | | |
| CDR1 | | |
| SEQ ID NO: 384 | VIWYDGSKRY YADSVKG | 17 |
| nivolumab | | |
| heavy chain | | |
| CDR2 | | |
| SEQ ID NO: 385 | NDDY | 4 |
| nivolumab | | |
| heavy chain | | |
| CDR3 | | |
| SEQ ID NO: 386 | RASQSVSSYL A | 11 |
| nivolumab | | |
| light chain | | |
| CDR1 | | |
| SEQ ID NO: 387 | DASNRAT | 7 |
| nivolumab | | |
| light chain | | |
| CDR2 | | |
| SEQ ID NO: 388 | QQSSNWPRT | 9 |
| nivolumab | | |
| light chain | | |
| CDR3 | | |
| SEQ ID NO: 389 | QVQLVQSGVE VKKPGASVKV SCKASGYTFT NYYMYWVRQA PGQGLEWMGG INPSNGGTNF | 60 |
| pembrolizumab | NEKFKNRVTL TTDSSTTTAY MELKSLQFDD TAVYYCARRD YRFDMGFDYW GQGTTVTVSS | 120 |
| heavy chain | ASTKGPSVFP LAPCSRSTSE STAALGCLVK DYFPEPVTVS WNSGALTSGV HTFPAVLQSS | 180 |
| | GLYSLSSVVT VPSSSLGTKT YTCNVDHKPS NTKVDKRVES KYGPPCPPCP APEFLGGPSV | 240 |
| | FLFPPKPKDT LMISRTPEVT CVVVDVSQED PEVQFNWYVD GVEVHNAKTK PREEQFNSTY | 300 |
| | RVVSVLTVLH QDWLNGKEYK CKVSNKGLPS SIEKTISKAK GQPREPQVYT LPPSQEEMTK | 360 |
| | NQVSLTCLVK GFYPSDIAVE WESNGQPENN YKTTPPVLDS DGSFFLYSRL TVDKSRWQEG | 420 |
| | NVFSCSVMHE ALHNHYTQKS LSLSLGK | 447 |
| SEQ ID NO: 390 | EIVLTQSPAT LSLSPGERAT LSCRASKGVS TSGYSYLHWY QQKPGQAPRL LIYLASYLES | 60 |
| pembrolizumab | GVPARFSGSG SGTDFTLTIS SLEPEDFAVY YCQHSRDLPL TFGGGTKVEI KRTVAAPSVF | 120 |
| light chain | IFPPSDEQLK SGTASVVCLL NNFYPREAKV QWKVDNALQS GNSQESVTEQ DSKDSTYSLS | 180 |
| | STLTLSKADY EKHKVYACEV THQGLSSPVT KSFNRGEC | 218 |
| SEQ ID NO: 391 | QVQLVQSGVE VKKPGASVKV SCKASGYTFT NYYMYWVRQA PGQGLEWMGG INPSNGGTNF | 60 |
| pembrolizumab | NEKFKNRVTL TTDSSTTTAY MELKSLQFDD TAVYYCARRD YRFDMGFDYW GQGTTVTVSS | 120 |
| variable heavy | | |
| chain | | |
| SEQ ID NO: 392 | EIVLTQSPAT LSLSPGERAT LSCRASKGVS TSGYSYLHWY QQKPGQAPRL LIYLASYLES | 60 |
| pembrolizumab | GVPARFSGSG SGTDFTLTIS SLEPEDFAVY YCQHSRDLPL TFGGGTKVEI K | 111 |
| variable light | | |
| chain | | |
| SEQ ID NO: 393 | NYYMY | 5 |
| pembrolizumab | | |
| heavy chain | | |
| CDR1 | | |
| SEQ ID NO: 394 | GINPSNGGTN FNEKFK | 16 |
| pembrolizumab | | |
| heavy chain | | |
| CDR2 | | |
| SEQ ID NO: 395 | RDYRFDMGFD Y | 11 |
| pembrolizumab | | |
| heavy chain | | |
| CDR3 | | |
| SEQ ID NO: 396 | RASKGVSTSG YSYLH | 15 |
| pembrolizumab | | |
| light chain | | |
| CDR1 | | |
| SEQ ID NO: 397 | LASYLES | 7 |
| pembrolizumab | | |
| light chain | | |
| CDR2 | | |
| SEQ ID NO: 398 | QHSRDLPLT | 9 |
| pembrolizumab | | |
| light chain | | |
| CDR3 | | |
| SEQ ID NO: 399 | QVQLVQSGSE LKKPGASVKI SCKASGYTFT NYGMNWVRQA PGQGLQWMGW INTDSGESTY | 60 |
| pidilizumab | AEEFKGRFVF SLDTSVNTAY LQITSLTAED TGMYFCVRVG YDALDYWGQG TLVTVSSAST | 120 |
| heavy chain | KGPSVFPLAP SSKSTSGGTA ALGCLVKDYF PEPVTVSWNS GALTSGVHTF PAVLQSSGLY | 180 |
| | SLSSVVTVPS SSLGTQTYIC NVNHKPSNTK VDKRVEPKSC DKTHTCPPCP APELLGGPSV | 240 |
| | FLFPPKPKDT LMISRTPEVT CVVVDVSHED PEVKFNWYVD GVEVHNAKTK PREEQYNSTY | 300 |
| | RVVSVLTVLH QDWLNGKEYK CKVSNKALPA PIEKTISKAK GQPREPQVYT LPPSREEMTK | 360 |
| | NQVSLTCLVK GFYPSDIAVE WESNGQPENN YKTTPPVLDS DGSFFLYSKL TVDKSRWQQG | 420 |
| | NVFSCSVMHE ALHNHYTQKS LSLSPGK | 447 |
| SEQ ID NO: 400 | EIVLTQSPSS LSASVGDRVT ITCSARSSVS YMHWFQQKPG KAPKLWIYRT SNLASGVPSR | 60 |
| pidilizumab | FSGSGSGTSY CLTINSLQPE DFATYYCQQR SSFPLTFGGG TKLEIKRTVA APSVFIFPPS | 120 |
| light chain | DEQLKSGTAS VVCLLNNFYP REAKVQWKVD NALQSGNSQE SVTEQDSKDS TYSLSSTLTL | 180 |
| | SKADYEKHKV YACEVTHQGL SSPVTKSFNR GEC | 213 |
| SEQ ID NO: 401 | QVQLVQSGSE LKKPGASVKI SCKASGYTFT NYGMNWVRQA PGQGLQWMGW INTDSGESTY | 60 |
| pidilizumab | AEEFKGRFVF SLDTSVNTAY LQITSLTAED TGMYFCVRVG YDALDYWGQG TLVTVSS | 117 |
| variable heavy | | |
| chain | | |
| SEQ ID NO: 402 | EIVLTQSPSS LSASVGDRVT ITCSARSSVS YMHWFQQKPG KAPKLWIYRT SNLASGVPSR | 60 |
| pidilizumab | FSGSGSGTSY CLTINSLQPE DFATYYCQQR SSFPLTFGGG TKLEIK | 106 |
| variable light | | |
| chain | | |

[1491] The PD-L1 or PD-L2 inhibitor may be any PD-L1 or PD-L2 inhibitor or blocker known in the art. In particular, it is one of the PD-L1 or PD-L2 inhibitors or blockers described in more detail in the following paragraphs. The terms “inhibitor” and “blocker” are used interchangeably herein in reference to PD-L1 and PD-L2 inhibitors. For avoidance of doubt, references herein to a PD-L1 or PD-L2 inhibitor that is an antibody may refer to a compound or antigen-binding fragments, variants, conjugates, or biosimilars thereof. For avoidance of doubt, references herein to a PD-L1 or PD-L2 inhibitor may refer to a compound or a pharmaceutically acceptable salt, ester, solvate, hydrate, cocrystal, or prodrug thereof.

[1492] In some embodiments, the compositions and methods include a PD-L1 or PD-L2 inhibitor. In some embodiments, the PD-L1 and PD-L2 inhibitor is a small molecule. In some embodiments, the PD-L1 or PD-L2 inhibitor is an anti-PD-L1 or anti-PD-L2 antibody, a fragment thereof, including Fab fragments or single-chain variable fragments (scFv). In an aspect of the invention, the anti-PD-1 antibody or fragment thereof in any of the aforementioned embodiments is replaced by, or combined with, an anti-PD-L1 or anti-PD-L2 antibody or fragment thereof. In an embodiment, the antibody competes for binding with, and/or binds to an epitope on PD-L1 and/or PD-L2. In some embodiments, the PD-L1 or PD-L2 inhibitor is a monoclonal antibody. In some embodiments the PD-L1 or PD-L2 inhibitor is a polyclonal antibody. In some embodiments, a PD-L1 inhibitor is included in a composition or a method and is further combined with a BTK inhibitor and a molecule selected from the group consisting of a GITR binding molecule, a 4-1BB agonist, an OX40 agonist, and combinations thereof. In some embodiments, an anti-PD-L1 monoclonal antibody is included in a composition or a method and is further combined with a BTK inhibitor, and a molecule selected from the group consisting of a GITR binding molecule, a 4-1BB agonist, an OX40 agonist, and combinations thereof. In some embodiments, a PD-L2 inhibitor is included in a composition or a method and is further combined with a BTK inhibitor and a molecule selected from the group consisting of a GITR binding molecule, a 4-1BB agonist, an OX40 agonist, and combinations thereof. In some embodiments, an anti-PD-L2 monoclonal antibody is included in a composition or a method and is further combined with a BTK inhibitor and a molecule selected from the group consisting of a GITR binding molecule, a 4-1BB agonist, an OX40 agonist, and combinations thereof. In some embodiments, a PD-L1 inhibitor is included in a composition or a method and is further combined with a BTK inhibitor. In some embodiments, an anti-PD-L1 monoclonal antibody is included in a composition or a method and is further combined with a BTK inhibitor. In some embodiments, a PD-L2 inhibitor is included in a composition or a method and is further combined with a BTK inhibitor. In some embodiments, an anti-PD-L2 monoclonal antibody is included in a composition or a method and is further combined with a BTK inhibitor. In some embodiments, a PD-L1 inhibitor is included in a composition or a method and is further combined with a molecule selected from the group consisting of a GITR binding molecule, a 4-1BB agonist, an OX40 agonist, and combinations thereof. In some embodiments, an anti-PD-L1 monoclonal antibody is included in a composition or a method and is further combined with a molecule selected from the group consisting of a GITR binding molecule, a 4-1BB agonist, an OX40 agonist, and combinations thereof. In some embodiments, a PD-L2 inhibitor is included in a composition or a method and is further combined with a molecule selected from the group consisting of a GITR binding molecule, a 4-1BB agonist, an OX40 agonist, and combinations thereof. In some embodiments, an anti-PD-L2 monoclonal antibody is included in a composition or a method and is further combined with a molecule selected from the group consisting of a GITR binding molecule, a 4-1BB agonist, an OX40 agonist, and combinations thereof. In some embodiments, both a PD-1 inhibitor and a PD-L1 inhibitor are included in a composition or method and are further combined with a BTK inhibitor, and/or a molecule selected from the group consisting of a GITR binding molecule, a 4-1BB agonist, an OX40 agonist, and combinations thereof. In some embodiments, both an anti-PD-1 monoclonal antibody and an anti-PD-L1 monoclonal antibody are included in a composition or method and are further combined with a BTK inhibitor and a molecule selected from the group consisting of a GITR binding molecule, a 4-1BB agonist, an OX40 agonist, and combinations thereof. In some embodiments, both a PD-1 inhibitor and a PD-L2 inhibitor are included in a composition or method and are further combined with a BTK inhibitor and a molecule selected from the group consisting of a GITR binding molecule, a 4-1BB agonist, an OX40 agonist, and combinations thereof. In some embodiments, both an anti-PD-1 monoclonal antibody and an anti-PD-L2 monoclonal antibody are included in a composition or method and are further combined with a BTK inhibitor and a molecule selected from the group consisting of a GITR binding molecule, a 4-1BB agonist, an OX40 agonist, and combinations thereof.

[1493] In preferred embodiments, the compositions described herein provide a combination of a PD-L1 and/or PD-L2 inhibitor with a BTK inhibitor, or methods of using a combination of a PD-L1 and/or PD-L2 inhibitor with a BTK inhibitor. In some embodiments, the PD-L1 inhibitors provided herein are selective for PD-L1, in that the compounds bind or interact with PD-L1 at substantially lower concentrations than they bind or interact with other receptors, including the PD-L2 receptor. In certain embodiments, the compounds bind to the PD-L2 receptor at a binding constant that is at least about a 2-fold higher concentration, about a 3-fold higher concentration, about a 5-fold higher concentration, about a 10-fold higher concentration, about a 20-fold higher concentration, about a 30-fold higher concentration, about a 50-fold higher concentration, about a 100-fold higher concentration, about a 200-fold higher concentration, about a 300-fold higher concentration, or about a 500-fold higher concentration than to the PD-L1 receptor.

[1494] Without being bound by any theory, it is believed that tumor cells express PD-L1, and that T cells express PD-1. However, PD-L1 expression by tumor cells is not required for efficacy of PD-1 or PD-L1 inhibitors or blockers. In an embodiment, the tumor cells express PD-L1. In another embodiment, the tumor cells do not express PD-L1. In some embodiments, the methods and compositions described herein include a combination of a PD-1 and a PD-L1 antibody, such as those described herein, in combination with a BTK inhibitor. The administration of a combination of a PD-1 and a PD-L1 antibody and a BTK inhibitor may be simultaneous or sequential.

[1495] In some embodiments, the compositions and methods described include a PD-L1 and/or PD-L2 inhibitor that binds human PD-L1 and/or PD-L2 with a K_{D} of about 100 pM or lower, binds human PD-L1 and/or PD-L2 with a K_{D} of about 90 pM or lower, binds human PD-L1 and/or PD-L2 with a K_{D} of about 80 pM or lower, binds human PD-L1 and/or PD-L2 with a K_{D} of about 70 pM or lower, binds human PD-L1 and/or PD-L2 with a K_{D} of about 60 pM or lower, a K_{D} of about 50 pM or lower, binds human PD-L1 and/or PD-L2 with a K_{D} of about 40 pM or lower, or binds human PD-L1 and/or PD-L2 with a KD of about 30 pM or lower,

[1496] In some embodiments, the compositions and methods described include a PD-L1 and/or PD-L2 inhibitor that binds to human PD-L1 and/or PD-L2 with a k_{assoc} of about 7.5×10⁵ 1/M·s or faster, binds to human PD-L1 and/or PD-L2 with a k_{assoc} of about 8×10⁵ l/M·s or faster, binds to human PD-L1 and/or PD-L2 with a k_{assoc} of about 8.5×10⁵ l/M·s or faster, binds to human PD-L1 and/or PD-L2 with a k_{assoc} of about 9×10⁵ l/M·s or faster, binds to human PD-L1 and/or PD-L2 with a k_{assoc} of about 9.5×10⁵ l/M·s and/or faster, or binds to human PD-L1 and/or PD-L2 with a k_{assoc} of about 1×10⁶ l/M·s or faster.

[1497] In some embodiments, the compositions and methods described include a PD-L1 and/or PD-L2 inhibitor that binds to human PD-L1 or PD-L2 with a k_{dissoc} of about 2×10⁻⁵ l/s or slower, binds to human PD-1 with a k_{dissoc} of about 2.1×10⁻⁵ l/s or slower, binds to human PD-1 with a k_{dissoc} of about 2.2×10⁻⁵ l/s or slower, binds to human PD-1 with a k_{dissoc} of about 2.3×10⁻⁵ l/s or slower, binds to human PD-1 with a k_{dissoc} of about 2.4×10⁻⁵ l/s or slower, binds to human PD-1 with a k_{dissoc} of about 2.5×10⁻⁵ l/s or slower, binds to human PD-1 with a k_{dissoc} of about 2.6×10⁻⁵ l/s or slower, binds to human PD-L1 or PD-L2 with a k_{dissoc} of about 2.7×10⁻⁵ 1/s or slower, or binds to human PD-L1 or PD-L2 with a k_{dissoc} s of about 3×10⁻⁵ l/s or slower.

[1498] In some embodiments, the compositions and methods described include a PD-L1 and/or PD-L2 inhibitor that blocks or inhibits binding of human PD-L1 or human PD-L2 to human PD-1 with an IC₅₀ of about 10 nM or lower; blocks or inhibits binding of human PD-L1 or human PD-L2 to human PD-1 with an IC₅₀ of about 9 nM or lower; blocks or inhibits binding of human PD-L1 or human PD-L2 to human PD-1 with an IC₅₀ of about 8 nM or lower; blocks or inhibits binding of human PD-L1 or human PD-L2 to human PD-1 with an IC₅₀ of about 7 nM or lower; blocks or inhibits binding of human PD-L1 or human PD-L2 to human PD-1 with an IC₅₀ of about 6 nM or lower; blocks or inhibits binding of human PD-L1 or human PD-L2 to human PD-1 with an IC₅₀ of about 5 nM or lower; blocks or inhibits binding of human PD-L or human PD-L2 to human PD-1 with an IC₅₀ of about 4 nM or lower; blocks or inhibits binding of human PD-L or human PD-L2 to human PD-1 with an IC₅₀ of about 3 nM or lower; blocks or inhibits binding of human PD-L or human PD-L2 to human PD-1 with an IC₅₀ of about 2 nM or lower; or blocks human PD-1, or blocks binding of human PD-L1 or human PD-L2 to human PD-1 with an IC₅₀ of about 1 nM or lower.

[1499] In an embodiment, the anti-PD-L1 antibody is durvalumab, also known as MEDI4736 (which is commercially available from Medimmune, LLC, Gaithersburg, Md., a subsidiary of AstraZeneca plc.), or antigen-binding fragments, conjugates, or variants thereof. In an embodiment, the anti-PD-L1 antibody is an antibody disclosed in U.S. Pat. No. 8,779,108 or U.S. Patent Application Publication No. 2013/0034559, the disclosures of which are specifically incorporated by reference herein. The clinical efficacy of durvalumab (SEQ ID NO:403 and SEQ ID NO:404) has been described in: Page, et al., Ann. Rev. Med., 2014, 65, 185-202; Brahmer, et al., J. Clin. Oncol. 2014, 32, 5s (supplement, abstract 8021); and McDermott, et al., Cancer Treatment Rev., 2014, 40, 1056-64. The durvalumab monoclonal antibody includes a V_{H} region given by SEQ ID NO:405 (corresponding to SEQ ID NO:72 in U.S. Pat. No. 8,779,108) and a V_{L} region given by SEQ ID NO:406 (corresponding to SEQ ID NO:77 in U.S. Pat. No. 8,779,108). The durvalumab monoclonal antibody includes disulfide linkages at 22-96, 22″-96″, 23′-89′, 23′″-89′″, 135′-195′, 135′″-195′″, 148-204, 148″-204″, 215′-224, 215′″-224″, 230-230″, 233-233″, 265-325, 265″-325″, 371-429, and 371″-429; and N-glycosylation sites at Asn-301 and Asn-301″.

[1500] In an embodiment, the anti-PD-L1 antibody is an immunoglobulin G1, anti-(human CD antigen CD274) (human monoclonal heavy chain), disulfide with human monoclonal κ-chain, dimer. In an embodiment, the anti-PD-L1 antibody comprises the heavy and light chains of durvalumab (MEDI4736). In an embodiment, an anti-PD-L1 antibody comprises heavy and light chains having the sequences shown in SEQ ID NO:403 and SEQ ID NO:404, respectively, or antigen binding fragments, variants, or conjugates thereof. In an embodiment, an anti-PD-L1 antibody comprises heavy and light chains that are each at least 99% identical to the sequences shown in SEQ ID NO:403 and SEQ ID NO:404, respectively. In an embodiment, an anti-PD-L1 antibody comprises heavy and light chains that are each at least 98% identical to the sequences shown in SEQ ID NO:403 and SEQ ID NO:404, respectively. In an embodiment, an anti-PD-L1 antibody comprises heavy and light chains that are each at least 97% identical to the sequences shown in SEQ ID NO:403 and SEQ ID NO:404, respectively. In an embodiment, an anti-PD-L1 antibody comprises heavy and light chains that are each at least 96% identical to the sequences shown in SEQ ID NO:403 and SEQ ID NO:404, respectively. In an embodiment, an anti-PD-L1 antibody comprises heavy and light chains that are each at least 95% identical to the sequences shown in SEQ ID NO:403 and SEQ ID NO:404, respectively.

[1501] In an embodiment, the anti-PD-L1 antibody is an anti-PD-L1 biosimilar monoclonal antibody approved by drug regulatory authorities with reference to durvalumab. In an embodiment, the biosimilar comprises an anti-PD-L1 antibody comprising an amino acid sequence which has at least 97% sequence identity, e.g., 97%, 98%, 99% or 100% sequence identity, to the amino acid sequence of a reference medicinal product or reference biological product and which comprises one or more post-translational modifications as compared to the reference medicinal product or reference biological product, wherein the reference medicinal product or reference biological product is durvalumab. In some embodiments, the one or more post-translational modifications are selected from one or more of: glycosylation, oxidation, deamidation, and truncation. In some embodiments, the biosimilar is an anti-PD-L1 antibody authorized or submitted for authorization, wherein the anti-PD-L1 antibody is provided in a formulation which differs from the formulations of a reference medicinal product or reference biological product, wherein the reference medicinal product or reference biological product is durvalumab. The anti-PD-L1 antibody may be authorized by a drug regulatory authority such as the U.S. FDA and/or the European Union's EMA. In some embodiments, the biosimilar is provided as a composition which further comprises one or more excipients, wherein the one or more excipients are the same or different to the excipients comprised in a reference medicinal product or reference biological product, wherein the reference medicinal product or reference biological product is durvalumab. In some embodiments, the biosimilar is provided as a composition which further comprises one or more excipients, wherein the one or more excipients are the same or different to the excipients comprised in a reference medicinal product or reference biological product, wherein the reference medicinal product or reference biological product is durvalumab.

[1502] In an embodiment, the anti-PD-L1 antibody comprises V_{H} and V_{L} regions having the sequences shown in SEQ ID NO:405 (corresponding to SEQ ID NO:72 in U.S. Pat. No. 8,779,108) and SEQ ID NO:406 (corresponding to SEQ ID NO:77 in U.S. Pat. No. 8,779,108), respectively, as described in U.S. Pat. No. 8,779,108 or U.S. Patent Application Publication No. US 2013/0034559, the disclosures of which are specifically incorporated by reference herein, including antigen binding fragments, conjugates, and variants thereof. In an embodiment, an anti-PD-L1 antibody comprises V_{H} and V_{L} regions that are each at least 99% identical to the sequences shown in SEQ ID NO:405 and SEQ ID NO:406, respectively. In an embodiment, an anti-PD-L1 antibody comprises V_{H} and V_{L} regions that are each at least 98% identical to the sequences shown in SEQ ID NO:405 and SEQ ID NO:406, respectively. In an embodiment, an anti-PD-L1 antibody comprises V_{H} and V_{L} regions that are each at least 97% identical to the sequences shown in SEQ ID NO:405 and SEQ ID NO:406, respectively. In an embodiment, an anti-PD-L1 antibody comprises V_{H} and V_{L} regions that are each at least 96% identical to the sequences shown in SEQ ID NO:405 and SEQ ID NO:406, respectively. In an embodiment, an anti-PD-L1 antibody comprises V_{H} and V_{L} regions that are each at least 95% identical to the sequences shown in SEQ ID NO:405 and SEQ ID NO:406, respectively. In an embodiment, an anti-PD-L1 antibody comprises V_{H} and V_{L} regions that are each at least 90% identical to the sequences shown in SEQ ID NO:405 and SEQ ID NO:406, respectively.

[1503] In an embodiment, the anti-PD-L1 antibody comprises heavy chain CDR1, CDR2 and CDR3 domains having the sequences set forth in SEQ ID NO:407, SEQ ID NO:408, and SEQ ID NO:409, respectively, and light chain CDR1, CDR2 and CDR3 domains having the sequences set forth in SEQ ID NO:410, SEQ ID NO:411, and SEQ ID NO:412, respectively.

[1504] In an embodiment, an anti-PD-L1 antibody comprises a heavy chain that comprises CDR1, CDR2 and CDR3 domains that are each at least 95% identical to the sequences shown in SEQ ID NO:407, SEQ ID NO:408, and SEQ ID NO:409, respectively. In an embodiment, an anti-PD-L1 antibody comprises a heavy chain that comprises CDR1, CDR2 and CDR3 domains that are each at least 90% identical to the sequences shown in SEQ ID NO:407, SEQ ID NO:408, and SEQ ID NO:409, respectively. In an embodiment, an anti-PD-L1 antibody comprises a heavy chain that comprises CDR1, CDR2 and CDR3 domains that are each at least 85% identical to the sequences shown in SEQ ID NO:407, SEQ ID NO:408, and SEQ ID NO:409, respectively. In an embodiment, an anti-PD-L1 antibody comprises a heavy chain that comprises CDR1, CDR2 and CDR3 domains that are each at least 80% identical to the sequences shown in SEQ ID NO:407, SEQ ID NO:408, and SEQ ID NO:409, respectively. In another embodiment, the antibody competes for binding with, and/or binds to the same epitope on PD-L1 as the aforementioned antibodies.

[1505] In an embodiment, an anti-PD-L1 antibody comprises a light chain that comprises CDR1, CDR2 and CDR3 domains that are each at least 95% identical to the sequences shown in SEQ ID NO:410, SEQ ID NO:411, and SEQ ID NO:412, respectively. In an embodiment, an anti-PD-L1 antibody comprises a light chain that comprises CDR1, CDR2 and CDR3 domains that are each at least 90% identical to the sequences shown in SEQ ID NO:410, SEQ ID NO:411, and SEQ ID NO:412, respectively. In an embodiment, an anti-PD-L1 antibody comprises a light chain that comprises CDR1, CDR2 and CDR3 domains that are each at least 85% identical to the sequences shown in SEQ ID NO:410, SEQ ID NO:411, and SEQ ID NO:412, respectively. In an embodiment, an anti-PD-L1 antibody comprises a light chain that comprises CDR1, CDR2 and CDR3 domains that are each at least 80% identical to the sequences shown in SEQ ID NO:410, SEQ ID NO:411, and SEQ ID NO:412, respectively. In another embodiment, the antibody competes for binding with, and/or binds to the same epitope on PD-L1 as the aforementioned antibodies.

[1506] In an embodiment, anti-PD-L1 antibodies and other PD-L1 inhibitors include those described in U.S. Pat. No. 8,779,108 and U.S. Patent Application Publication No. US 2013/0034559A1, the disclosures of which are hereby incorporated by reference. In another embodiment, antibodies that compete with any of these antibodies for binding to PD-L1 are also included.

[1507] In an embodiment, the anti-PD-L1 antibody is atezolizumab, also known as MPDL3280A or RG7446 (commercially available from Genentech, Inc., a subsidiary of Roche), or antigen-binding fragments, conjugates, or variants thereof. In an embodiment, the anti-PD-L1 antibody is an antibody disclosed in U.S. Pat. No. 8,217,149, the disclosure of which is specifically incorporated by reference herein. In an embodiment, the anti-PD-L1 antibody is an antibody disclosed in U.S. Patent Application Publication Nos. 2010/0203056 A1, 2013/0045200 A1, 2013/0045201 A1, 2013/0045202 A1, or 2014/0065135 A1, the disclosures of which are specifically incorporated by reference herein. The atezolizumab monoclonal antibody includes a heavy chain given by SEQ ID NO:413 and a light chain given by SEQ ID NO:414. Atezolizumab has intra-heavy chain disulfide linkages (C23-C104) at 22-96, 145-201, 262-322, 368-426, 22″-96″, 145″-201″, 262″-322″, and 368″-426″; intra-light chain disulfide linkages (C23-C104) at 23′-88′, 134′-194′, 23′″-88′″, and 134′″-194′″; intra-heavy-light chain disulfide linkages (h 5-CL 126) at 221-214′ and 221″-214′″; intra-heavy-heavy chain disulfide linkages (h 11, h 14) at 227-227′ and 230-230″; and N-glycosylation sites (H CH₂ N84.4>A) at 298 and 298′.

[1508] In an embodiment, the anti-PD-L1 antibody is an immunoglobulin G1 kappa, anti-(human PD-L1) humanized monoclonal antibody. In an embodiment, the anti-PD-L1 antibody comprises the heavy and light chains of atezolizumab (MPDL3280A). In an embodiment, an anti-PD-L1 antibody comprises heavy and light chains having the sequences shown in SEQ ID NO:413 and SEQ ID NO:414, respectively, or antigen binding fragments, variants, or conjugates thereof. In an embodiment, an anti-PD-L1 antibody comprises heavy and light chains that are each at least 99% identical to the sequences shown in SEQ ID NO:413 and SEQ ID NO:414, respectively. In an embodiment, an anti-PD-L1 antibody comprises heavy and light chains that are each at least 98% identical to the sequences shown in SEQ ID NO:413 and SEQ ID NO:414, respectively. In an embodiment, an anti-PD-L1 antibody comprises heavy and light chains that are each at least 97% identical to the sequences shown in SEQ ID NO:413 and SEQ ID NO:414, respectively. In an embodiment, an anti-PD-L1 antibody comprises heavy and light chains that are each at least 96% identical to the sequences shown in SEQ ID NO:413 and SEQ ID NO:414, respectively. In an embodiment, an anti-PD-L1 antibody comprises heavy and light chains that are each at least 95% identical to the sequences shown in SEQ ID NO:413 and SEQ ID NO:414, respectively.

[1509] In an embodiment, the anti-PD-L1 antibody is an anti-PD-L1 biosimilar monoclonal antibody approved by drug regulatory authorities with reference to atezolizumab. In an embodiment, the biosimilar comprises an anti-PD-L1 antibody comprising an amino acid sequence which has at least 97% sequence identity, e.g., 97%, 98%, 99% or 100%0/sequence identity, to the amino acid sequence of a reference medicinal product or reference biological product and which comprises one or more post-translational modifications as compared to the reference medicinal product or reference biological product, wherein the reference medicinal product or reference biological product is atezolizumab. In some embodiments, the one or more post-translational modifications are selected from one or more of: glycosylation, oxidation, deamidation, and truncation. In some embodiments, the biosimilar is an anti-PD-L1 antibody authorized or submitted for authorization, wherein the anti-PD-L1 antibody is provided in a formulation which differs from the formulations of a reference medicinal product or reference biological product, wherein the reference medicinal product or reference biological product is atezolizumab. The anti-PD-L1 antibody may be authorized by a drug regulatory authority such as the U.S. FDA and/or the European Union's EMA. In some embodiments, the biosimilar is provided as a composition which further comprises one or more excipients, wherein the one or more excipients are the same or different to the excipients comprised in a reference medicinal product or reference biological product, wherein the reference medicinal product or reference biological product is atezolizumab. In some embodiments, the biosimilar is provided as a composition which further comprises one or more excipients, wherein the one or more excipients are the same or different to the excipients comprised in a reference medicinal product or reference biological product, wherein the reference medicinal product or reference biological product is atezolizumab.

[1510] In an embodiment, the anti-PD-L1 antibody comprises the heavy and light chain CDRs or VRs of atezolizumab (MPDL3280A). In an embodiment, the anti-PD-L1 antibody V_{H} region comprises the sequence shown in SEQ ID NO:415 (corresponding to SEQ ID NO:20 in U.S. Pat. No. 8,217,149), and the anti-PD-L1 antibody V_{L} region comprises the sequence shown in SEQ ID NO:416 (corresponding to SEQ ID NO:21 in U.S. Pat. No. 8,217,149). In an embodiment, an anti-PD-L1 antibody comprises V_{H} and V_{L} regions that are each at least 99% identical to the sequences shown in SEQ ID NO:415 and SEQ ID NO:416, respectively. In an embodiment, an anti-PD-L1 antibody comprises V_{H} and V_{L} regions that are each at least 98% identical to the sequences shown in SEQ ID NO:415 and SEQ ID NO:416, respectively. In an embodiment, an anti-PD-L1 antibody comprises V_{H} and V_{L} regions that are each at least 97% identical to the sequences shown in SEQ ID NO:415 and SEQ ID NO:416, respectively. In an embodiment, an anti-PD-L1 antibody comprises V_{H} and V_{L} regions that are each at least 96% identical to the sequences shown in SEQ ID NO:415 and SEQ ID NO:416, respectively. In an embodiment, an anti-PD-L1 antibody comprises V_{H} and V_{L} regions that are each at least 95% identical to the sequences shown in SEQ ID NO:415 and SEQ ID NO:416, respectively.

[1511] In an embodiment, the anti-PD-L1 antibody comprises a heavy chain variable region (V_{H}) polypeptide that comprises a CDR1, CDR2, and CDR3 sequence, wherein the CDR1 sequence is given by SEQ ID NO:417 (GFTFSX₁SWIH) (corresponding to SEQ ID NO: 1 in U.S. Pat. No. 8,217,149), the CDR2 sequence is SEQ ID NO:418 (AWIX₂PYGGSX₃YYADSVKG) (corresponding to SEQ ID NO:2 in U.S. Pat. No. 8,217,149), and the CDR3 sequence is SEQ ID NO:419 (RHWPGGFDY) (corresponding to SEQ ID NO:3 in U.S. Pat. No. 8,217,149), further wherein X₁ is D or G, X₂ is S or L, and X₃ is T or S, and the anti-PD-L1 antibody also comprises a light chain variable region (V_{L}) polypeptide that comprises a CDR1, CDR2, and CDR3 sequence wherein the CDR1 sequence is given by SEQ ID NO:420 (RASQX₄X₅X₆TX₇X₈A) (corresponding to SEQ ID NO:8 in U.S. Pat. No. 8,217,149), the CDR2 sequence is given by SEQ ID NO:421 (SASX₉LX₁₀S) (corresponding to SEQ ID NO:9 in U.S. Pat. No. 8,217,149), and the CDR3 sequence is SEQ ID NO:422 (QQX₁₁X₁₂X₁₃X₁₄PX₁₅T) (corresponding to SEQ ID NO: 10 in U.S. Pat. No. 8,217,149), further wherein further wherein: X₄ is D or V; X₅ is V or I; X₆ is S or N; X₇ is A or F; X₈ is V or L; X₉ is F or T; X₁₀ is Y or A; X₁₁ is Y, G, F, or S; X₂ is L, Y, F or W; X₁₃ is Y, N, A, T, G, F or I; X₁₄ is H, V, P, T or I; and X₁₅ is A, W, R, P or T.

[1512] In an embodiment, the anti-PD-L1 antibody is avelumab, also known as MSB0010718C (commercially available from Merck KGaA/EMD Serono), or antigen-binding fragments, conjugates, or variants thereof. In an embodiment, the anti-PD-L1 antibody is an antibody disclosed in U.S. Patent Application Publication No. US 2014/0341917 A1, the disclosure of which is specifically incorporated by reference herein. The avelumab monoclonal antibody includes a heavy chain given by SEQ ID NO:423 and a light chain given by SEQ ID NO:424. Avelumab has intra-heavy chain disulfide linkages (C23-C104) at 22-96, 147-203, 264-324, 370-428, 22″-96″, 147″-203″, 264″-324″, and 370″-428″; intra-light chain disulfide linkages (C23-C104) at 22′-90′, 138′-197, 22′″-90′″, and 138′″-197″; intra-heavy-light chain disulfide linkages (h 5-CL 126) at 223-215′ and 223″-215′″; intra-heavy-heavy chain disulfide linkages (h 11, h 14) at 229-229″ and 232-232″; N-glycosylation sites (H CH₂ N84.4) at 300, 300″; fucosylated complex bi-antennary CHO-type glycans; and H CHS K2 C-terminal lysine clipping at 450 and 450′.

[1513] In an embodiment, the anti-PD-L1 antibody is an immunoglobulin G1 lambda-1, anti-(human PD-L1) human monoclonal antibody. In an embodiment, the anti-PD-L1 antibody comprises the heavy and light chains of avelumab (MSB0010718C). In an embodiment, an anti-PD-L1 antibody comprises heavy and light chains having the sequences shown in SEQ ID NO:423 and SEQ ID NO:424, respectively, or antigen binding fragments, variants, or conjugates thereof. In an embodiment, an anti-PD-L1 antibody comprises heavy and light chains that are each at least 99% identical to the sequences shown in SEQ ID NO:423 and SEQ ID NO:424, respectively. In an embodiment, an anti-PD-L1 antibody comprises heavy and light chains that are each at least 98% identical to the sequences shown in SEQ ID NO:423 and SEQ ID NO:424, respectively. In an embodiment, an anti-PD-L1 antibody comprises heavy and light chains that are each at least 97% identical to the sequences shown in SEQ ID NO:423 and SEQ ID NO:424, respectively. In an embodiment, an anti-PD-L1 antibody comprises heavy and light chains that are each at least 96% identical to the sequences shown in SEQ ID NO:423 and SEQ ID NO:424, respectively. In an embodiment, an anti-PD-L1 antibody comprises heavy and light chains that are each at least 95% identical to the sequences shown in SEQ ID NO:423 and SEQ ID NO:424, respectively.

[1514] In an embodiment, the anti-PD-L1 antibody is an anti-PD-L1 biosimilar monoclonal antibody approved by drug regulatory authorities with reference to avelumab. In an embodiment, the biosimilar comprises an anti-PD-L1 antibody comprising an amino acid sequence which has at least 97% sequence identity, e.g., 97%, 98%, 99% or 100% sequence identity, to the amino acid sequence of a reference medicinal product or reference biological product and which comprises one or more post-translational modifications as compared to the reference medicinal product or reference biological product, wherein the reference medicinal product or reference biological product is avelumab. In some embodiments, the one or more post-translational modifications are selected from one or more of: glycosylation, oxidation, deamidation, and truncation. In some embodiments, the biosimilar is an anti-PD-L1 antibody authorized or submitted for authorization, wherein the anti-PD-L1 antibody is provided in a formulation which differs from the formulations of a reference medicinal product or reference biological product, wherein the reference medicinal product or reference biological product is avelumab. The anti-PD-L1 antibody may be authorized by a drug regulatory authority such as the U.S. FDA and/or the European Union's EMA. In some embodiments, the biosimilar is provided as a composition which further comprises one or more excipients, wherein the one or more excipients are the same or different to the excipients comprised in a reference medicinal product or reference biological product, wherein the reference medicinal product or reference biological product is avelumab. In some embodiments, the biosimilar is provided as a composition which further comprises one or more excipients, wherein the one or more excipients are the same or different to the excipients comprised in a reference medicinal product or reference biological product, wherein the reference medicinal product or reference biological product is avelumab.

[1515] In an embodiment, the anti-PD-L1 antibody V_{H} region comprises the sequence given in SEQ ID NO:425 (corresponding to SEQ ID NO:24 in U.S. Patent Application Publication No. US 2014/0341917 A1), and the anti-PD-L1 antibody V_{L} region comprises the sequence given in SEQ ID NO:426 (corresponding to SEQ ID NO:25 in U.S. Patent Application Publication No. US 2014/0341917 A1). In an embodiment, an anti-PD-L1 antibody comprises V_{H} and V_{L} regions that are each at least 99% identical to the sequences shown in SEQ ID NO:425 and SEQ ID NO:426, respectively. In an embodiment, an anti-PD-L1 antibody comprises V_{H} and V_{L} regions that are each at least 98% identical to the sequences shown in SEQ ID NO:425 and SEQ ID NO:426, respectively. In an embodiment, an anti-PD-L1 antibody comprises V_{H} and V_{L} regions that are each at least 97% identical to the sequences shown in SEQ ID NO:425 and SEQ ID NO:426, respectively. In an embodiment, an anti-PD-L1 antibody comprises V_{H} and V_{L} regions that are each at least 96% identical to the sequences shown in SEQ ID NO:425 and SEQ ID NO:426, respectively. In an embodiment, an anti-PD-L1 antibody comprises V_{H} and V_{L} regions that are each at least 95% identical to the sequences shown in SEQ ID NO:425 and SEQ ID NO:426, respectively.

[1516] In an embodiment, the anti-PD-L1 antibody comprises a heavy chain variable region (V_{H}) polypeptide that comprises a CDR1, CDR2, and CDR3 sequence, wherein the CDR1 sequence is given by SEQ ID NO:427 (corresponding to SEQ ID NO:15 in U.S. Patent Application Publication No. US 2014/0341917 A1), the CDR2 sequence is given by SEQ ID NO:428 (corresponding to SEQ ID NO: 16 in U.S. Patent Application Publication No. US 2014/0341917 A1), and the CDR3 sequence is given by SEQ ID NO:429 (corresponding to SEQ ID NO: 17 in U.S. Patent Application Publication No. US 2014/0341917 A1), and the anti-PD-L1 antibody also comprises a light chain variable region (V_{L}) polypeptide that comprises a CDR1, CDR2, and CDR3 sequence wherein the CDR1 sequence is given by SEQ ID NO:430 (corresponding to SEQ ID NO:18 in U.S. Patent Application Publication No. US 2014/0341917 A1), the CDR2 sequence is given by SEQ ID NO:431 (corresponding to SEQ ID NO: 19 in U.S. Patent Application Publication No. US 2014/0341917 A1), and the CDR3 sequence is given by SEQ ID NO:432 (corresponding to SEQ ID NO:20 in U.S. Patent Application Publication No. US 2014/0341917 A1).

[1517] In an embodiment, an anti-PD-L1 antibody comprises a heavy chain that comprises CDR1, CDR2 and CDR3 domains that are each at least 95% identical to the sequences shown in SEQ ID NO:427, SEQ ID NO:428, and SEQ ID NO:429, respectively. In an embodiment, an anti-PD-L1 antibody comprises a heavy chain that comprises CDR1, CDR2 and CDR3 domains that are each at least 90% identical to the sequences shown in SEQ ID NO:427, SEQ ID NO:428, and SEQ ID NO:429, respectively. In an embodiment, an anti-PD-L1 antibody comprises a heavy chain that comprises CDR1, CDR2 and CDR3 domains that are each at least 85% identical to the sequences shown in SEQ ID NO:427, SEQ ID NO:428, and SEQ ID NO:429, respectively. In an embodiment, an anti-PD-L1 antibody comprises a heavy chain that comprises CDR1, CDR2 and CDR3 domains that are each at least 80% identical to the sequences shown in SEQ ID NO:427, SEQ ID NO:428, and SEQ ID NO:429, respectively. In another embodiment, the antibody competes for binding with, and/or binds to the same epitope on PD-L1 as the aforementioned antibodies.

[1518] In an embodiment, an anti-PD-L1 antibody comprises a light chain that comprises CDR1, CDR2 and CDR3 domains that are each at least 95% identical to the sequences shown in SEQ ID NO:430, SEQ ID NO:431, and SEQ ID NO:432, respectively. In an embodiment, an anti-PD-L1 antibody comprises a light chain that comprises CDR1, CDR2 and CDR3 domains that are each at least 90% identical to the sequences shown in SEQ ID NO:430, SEQ ID NO:431, and SEQ ID NO:432, respectively. In an embodiment, an anti-PD-L1 antibody comprises a light chain that comprises CDR1, CDR2 and CDR3 domains that are each at least 85% identical to the sequences shown in SEQ ID NO:430, SEQ ID NO:431, and SEQ ID NO:432, respectively. In an embodiment, an anti-PD-L1 antibody comprises a light chain that comprises CDR1, CDR2 and CDR3 domains that are each at least 80% identical to the sequences shown in SEQ ID NO:430, SEQ ID NO:431, and SEQ ID NO:432, respectively. In another embodiment, the antibody competes for binding with, and/or binds to the same epitope on PD-L1 as the aforementioned antibodies.

[1519] In an embodiment, anti-PD-L1 antibodies and other PD-L1 inhibitors include those described in U.S. Patent Application Publication No. US 2014/0341917 A1, the disclosure of which is hereby incorporated by reference. In another embodiment, antibodies that compete with any of these antibodies for binding to PD-L1 are also included.

[1520] In an embodiment, the anti-PD-L1 antibody is MDX-1105, also known as BMS-935559, which is disclosed in U.S. Pat. No. 7,943,743 B2, the disclosures of which are specifically incorporated by reference herein. In an embodiment, the anti-PD-L1 antibody is selected from the anti-PD-L1 antibodies disclosed in U.S. Pat. No. 7,943,743 B2, which are specifically incorporated by reference herein.

[1521] In an embodiment, the anti-PD-L1 antibody is a commercially-available monoclonal antibody, such as INVIVOMAB anti-m-PD-L1 clone 10F.9G2 (Catalog # BE0101, Bio X Cell, Inc., West Lebanon, N.H., USA). In an embodiment, the anti-PD-L1 antibody is a commercially-available monoclonal antibody, such as AFFYMETRIX EBIOSCIENCE (MIH1). A number of commercially-available anti-PD-L1 antibodies are known to one of ordinary skill in the art.

[1522] In an embodiment, the anti-PD-L2 antibody is a commercially-available monoclonal antibody, such as BIOLEGEND 24F.10C12 Mouse IgG2a, K isotype (catalog #329602 Biolegend, Inc., San Diego, Calif.), SIGMA anti-PD-L2 antibody (catalog # SAB3500395, Sigma-Aldrich Co., St. Louis, Mo.), or other commercially-available anti-PD-L2 antibodies known to one of ordinary skill in the art.

[1523] Monoclonal antibodies that inhibit PD-L1 and/or PD-L2 can be prepared by procedures known to those of ordinary knowledge and skill in the art, e.g., by injecting test subjects with PD-L1 or PD-L2 antigen and then isolating hybridomas expressing antibodies having the desired sequence or functional characteristics. DNA encoding the monoclonal antibodies is readily isolated and sequenced using conventional procedures (e.g., by using oligonucleotide probes that are capable of binding specifically to genes encoding the heavy and light chains of the monoclonal antibodies). The hybridoma cells serve as a preferred source of such DNA. Once isolated, the DNA may be placed into expression vectors, which are then transfected into host cells such as E. coli cells, simian COS cells, Chinese hamster ovary (CHO) cells, myeloma cells, or other suitable cells that do not otherwise produce immunoglobulin protein, to obtain the synthesis of monoclonal antibodies in the recombinant host cells. The details of recombinant production of specific antibodies may be found in the references cited in the foregoing, the disclosures of which are incorporated by reference herein. Monoclonal antibodies that inhibit PD-1 can be prepared by standard molecular biology methods using the sequences provided herein by reverse translation and insertion into appropriate DNA or RNA vectors.

[1524] The anti-PD-L1 antibody sequences referenced in some of the foregoing embodiments are summarized in Table 17.

TABLE 17
Anti-PD-L1 antibody amino acid sequences.

| Identifier | Sequence (One-Letter Amino Acid Symbols) | |
|---|---|---|
| SEQ ID NO: 403 | EVQLVESGGG LVQPGGSLRL SCAASGFTFS RYWMSWVRQA PGKGLEWVAN IKQDGSEKYY | 60 |
| durvalumab | VDSVKGRFTI SRDNAKNSLY LQMNSLRAED TAVYYCAREG GWFGELAFDY WGQGTLVTVS | 120 |
| (MEDI4736) | SASTKGPSVF PLAPSSKSTS GGTAALGCLV KDYFPEPVTV SWNSGALTSG VHTFPAVLQS | 180 |
| heavy chain | SGLYSLSSVV TVPSSSLGTQ TYICNVNHKP SNTKVDKRVE PKSCDKTHTC PPCPAPEFEG | 240 |
| | GPSVFLFPPK PKDTLMISRT PEVTCVVVDV SHEDPEVKFN WYVDGVEVHN AKTKPREEQY | 300 |
| | NSTYRVVSVL TVLHQDWLNG KEYKCKVSNK ALPASIEKTI SKAKGQPREP QVYTLPPSRE | 360 |
| | EMTKNQVSLT CLVKGFYPSD IAVEWESNGQ PENNYKTTPP VLDSDGSFFL YSKLTVDKSR | 420 |
| | WQQGNVFSCS VMHEALHNHY TQKSLSLSPG K | 451 |
| SEQ ID NO: 404 | EVQLVESGGG LVQPGGSLRL SCAASGFTFS RYWMSWVRQA PGKGLEWVAN EIVLTQSPGT | 60 |
| durvalumab | LSLSPGERAT LSCRASQRVS SSYLAWYQQK PGQAPRLLIY DASSRATGIP DRFSGSGSGT | 120 |
| (MEDI4736) | DFTLTISRLE PEDFAVYYCQ QYGSLPWTFG QGTKVEIKRT VAAPSVFIFP PSDEQLKSGT | 180 |
| light chain | ASVVCLLNNF YPREAKVQWK VDNALQSGNS QESVTEQDSK DSTYSLSSTL TLSKADYEKH | 240 |
| | KVYACEVTHQ GLSSPVTKSF NRGEC | 265 |
| SEQ ID NO: 405 | EVQLVESGGG LVQPGGSLRL SCAASGFTFS RYWMSWVRQA PGKGLEWVAN IKQDGSEKYY | 60 |
| durvalumab | VDSVKGRFTI SRDNAKNSLY LQMNSLRAED TAVYYCAREG GWFGELAFDY WGQGTLVTVS | 120 |
| variable | S | 121 |
| heavy chain | | |
| SEQ ID NO: 406 | EIVLTQSPGT LSLSPGERAT LSCRASQRVS SSYLAWYQQK PGQAPRLLIY DASSRATGIP | 60 |
| durvalumab | DRFSGSGSGT DFTLTISRLE PEDFAVYYCQ QYGSLPWTFG QGTKVEIK | 108 |
| variable | | |
| light chain | | |
| SEQ ID NO: 407 | RYWMS | 5 |
| durvalumab | | |
| heavy chain | | |
| CDR1 | | |
| SEQ ID NO: 408 | NIKQDGSEKY YVDSVKG | 17 |
| durvalumab | | |
| heavy chain | | |
| CDR2 | | |
| SEQ ID NO: 409 | EGGWFGELAF DY | 12 |
| durvalumab | | |
| heavy chain | | |
| CDR3 | | |
| SEQ ID NO: 410 | RASQRVSSSY LA | 12 |
| durvalumab | | |
| light chain | | |
| CDR1 | | |
| SEQ ID NO: 411 | DASSRAT | 7 |
| durvalumab | | |
| light chain | | |
| CDR2 | | |
| SEQ ID NO: 412 | QQYGSLPWT | 9 |
| durvalumab | | |
| light chain | | |
| CDR3 | | |
| SEQ ID NO: 413 | EVQLVESGGG LVQPGGSLRL SCAASGFTFS DSWIHWVRQA PGKGLEWVAW ISPYGGSTYY | 60 |
| atezolizumab | ADSVKGRFTI SADTSKNTAY LQMNSLRAED TAVYYCARRH WPGGFDYWGQ GTLVTVSSAS | 120 |
| (MPDL3280A) | TKGPSVFPLA PSSKSTSGGT AALGCLVKDY FPEPVTVSWN SGALTSGVHT FPAVLQSSGL | 180 |
| heavy chain | YSLSSVVTVP SSSLGTQTYI CNVNHKPSNT KVDKKVEPKS CDKTHTCPPC PAPELLGGPS | 240 |
| | VFLFPPKPKD TLMISRTPEV TCVVVDVSHE DPEVKFNWYV DGVEVHNAKT KPREEQYAST | 300 |
| | YRVVSVLTVL HQDWLNGKEY KCKVSNKALP APIEKTISKA KGQPREPQVY TLPPSREEMT | 360 |
| | KNQVSLTCLV KGFYPSDIAV EWESNGQPEN NYKTTPPVLD SDGSFFLYSK LTVDKSRWQQ | 420 |
| | GNVFSCSVMH EALHNHYTQK SLSLSPGK | 448 |
| SEQ ID NO: 414 | DIQMTQSPSS LSASVGDRVT ITCRASQDVS TAVAWYQQKP GKAPKLLIYS ASFLYSGVPS | 60 |
| atezolizumab | RFSGSGSGTD FTLTISSLQP EDFATYYCQQ YLYHPATFGQ GTKVEIKRTV AAPSVFIFPP | 120 |
| (MPDL3280A) | SDEQLKSGTA SVVCLLNNFY PREAKVQWKV DNALQSGNSQ ESVTEQDSKD STYSLSSTLT | 180 |
| light chain | LSKADYEKHK VYACEVTHQG LSSPVTKSFN RGEC | 214 |
| SEQ ID NO: 415 | EVQLVESGGG LVQPGGSLRL SCAASGFTFS DSWIHWVRQA PGKGLEWVAW ISPYGGSTYY | 60 |
| atezolizumab | ADSVKGRFTI SADTSKNTAY LQMNSLRAED TAVYYCARRH WPGGFDYWGQ GTLVTVSA | 118 |
| variable | | |
| heavy chain | | |
| SEQ ID NO: 416 | DIQMTQSPSS LSASVGDRVT ITCRASQDVS TAVAWYQQKP GKAPKLLIYS ASFLYSGVPS | 60 |
| atezolizumab | RFSGSGSGTD FTLTISSLQP EDFATYYCQQ YLYHPATFGQ GTKVEIKR | 108 |
| variable | | |
| light chain | | |
| SEQ ID NO: 417 | GFTFSXSWIH | 10 |
| atezolizumab | | |
| heavy chain | | |
| CDR1 | | |
| SEQ ID NO: 418 | AWIXPYGGSX YYADSVKG | 18 |
| atezolizumab | | |
| heavy chain | | |
| CDR2 | | |
| SEQ ID NO: 419 | RHWPGGFDY | 9 |
| atezolizumab | | |
| heavy chain | | |
| CDR3 | | |
| SEQ ID NO: 420 | RASQXXXTXX A | 11 |
| atezolizumab | | |
| light chain | | |
| CDR1 | | |
| SEQ ID NO: 421 | SASXLXS | 7 |
| atezolizumab | | |
| light chain | | |
| CDR2 | | |
| SEQ ID NO: 422 | QQXXXXPXT | 9 |
| atezolizumab | | |
| light chain | | |
| CDR3 | | |
| SEQ ID NO: 423 | EVQLLESGGG LVQPGGSLRL SCAASGFTFS SYIMMWVRQA PGKGLEWVSS IYPSGGITFY | 60 |
| avelumab | ADTVKGRFTI SRDNSKNTLY LQMNSLRAED TAVYYCARIK LGTVTTVDYW GQGTLVTVSS | 120 |
| (MSB0010718C) | ASTKGPSVFP LAPSSKSTSG GTAALGCLVK DYFPEPVTVS WNSGALTSGV HTFPAVLQSS | 180 |
| heavy chain | GLYSLSSVVT VPSSSLGTQT YICNVNHKPS NTKVDKKVEP KSCDKTHTCP PCPAPELLGG | 240 |
| | PSVFLFPPKP KDTLMISRTP EVTCVVVDVS HEDPEVKFNW YVDGVEVHNA KTKPREEQYN | 300 |
| | STYRVVSVLT VLHQDWLNGK EYKCKVSNKA LPAPIEKTIS KAKGQPREPQ VYTLPPSRDE | 360 |
| | LTKNQVSLTC LVKGFYPSDI AVEWESNGQP ENNYKTTPPV LDSDGSFFLY SKLTVDKSRW | 420 |
| | QQGNVFSCSV MHEALHNHYT QKSLSLSPGK | 450 |
| SEQ ID NO: 424 | QSALTQPASV SGSPGQSITI SCTGTSSDVG GYNYVSWYQQ HPGKAPKLMI YDVSNRPSGV | 60 |
| avelumab | SNRFSGSKSG NTASLTISGL QAEDEADYYC SSYTSSSTRV FGTGTKVTVL GQPKANPTVT | 120 |
| (MSB0010718C) | LFPPSSEELQ ANKATLVCLI SDFYPGAVTV AWKADGSPVK AGVETTKPSK QSNNKYAASS | 180 |
| light chain | YLSLTPEQWK SHRSYSCQVT HEGSTVEKTV APTECS | 216 |
| SEQ ID NO: 425 | EVQLLESGGG LVQPGGSLRL SCAASGFTFS SYIMMWVRQA PGKGLEWVSS IYPSGGITFY | 60 |
| avelumab | ADTVKGRFTI SRDNSKNTLY LQMNSLRAED TAVYYCARIK LGTVTTVDYW GQGTLVTVSS | 120 |
| variable | | |
| heavy chain | | |
| SEQ ID NO: 426 | QSALTQPASV SGSPGQSITI SCTGTSSDVG GYNYVSWYQQ HPGKAPKLMI YDVSNRPSGV | 60 |
| avelumab | SNRFSGSKSG NTASLTISGL QAEDEADYYC SSYTSSSTRV FGTGTKVTVL | 110 |
| variable | | |
| light chain | | |
| SEQ ID NO: 427 | SYIMM | 5 |
| avelumab | | |
| heavy chain | | |
| CDR1 | | |
| SEQ ID NO: 428 | SIYPSGGITF YADTVKG | 17 |
| avelumab | | |
| heavy chain | | |
| CDR2 | | |
| SEQ ID NO: 429 | IKLGTVTTVD Y | 11 |
| avelumab | | |
| heavy chain | | |
| CDR3 | | |
| SEQ ID NO: 430 | TGTSSDVGGY NYVS | 14 |
| avelumab | | |
| light chain | | |
| CDR1 | | |
| SEQ ID NO: 431 | DVSNRPS | 7 |
| avelumab | | |
| light chain | | |
| CDR2 | | |
| SEQ ID NO: 432 | SSYTSSSTRV | 10 |
| avelumab | | |
| light chain | | |
| CDR3 | | |

[1525] The preparation, properties, and uses of suitable PD-1 and PD-L1 inhibitors are described in, e.g., U.S. Pat. No. 8,008,449 or U.S. Patent Application Publication Nos. 2009/0217401 A1 or 2013/0133091 A1; U.S. Pat. No. 8,354,509 and U.S. Patent Application Publication Nos. US 2010/0266617 A1, US 2013/0108651 A1, and US 2013/0109843 A2; U.S. Pat. Nos. 8,287,856, 8,580,247, and 8,168,757 and U.S. Patent Application Publication Nos. US 2009/0028857 A1, US 2010/0285013 A1, US 2013/0022600 A1, and US 2011/0008369 A1; U.S. Pat. No. 8,779,108 or U.S. Patent Application Publication No. US 2013/0034559 A1; U.S. Pat. No. 8,217,149 and U.S. Patent Application Publication Nos. US 2010/0203056 A1, US 2013/0045200 A1, US 2013/0045201 A1, US 2013/0045202 A1, or US 2014/0065135 A1; and U.S. Patent Application Publication No. US 2014/0341917 A1, the disclosures of each of which are incorporated by reference herein.

[1526] In any of the foregoing embodiments, the PD-1 and/or PD-L1 inhibitors or combinations thereof may be administered before, concurrently, or after administration of the molecule selected from the group consisting of a GITR binding molecule, a 4-1BB agonist, an OX40 agonist, and combinations thereof and the BTK inhibitor.

[1527] In an embodiment, the PD-1 or PD-L1 inhibitor is an anti-PD-1 or anti-PD-L1 biosimilar monoclonal antibody approved by drug regulatory authorities with reference to inhibitor selected from the group consisting of nivolumab, pembrolizumab, pidilizumab, durvalumab, atezolizumab, or avelumab. In an embodiment, the biosimilar comprises an anti-PD-1 or anti-PD-L1 antibody comprising an amino acid sequence which has at least 97% sequence identity, e.g., 97%, 98%, 99% or 100% sequence identity, to the amino acid sequence of a reference medicinal product or reference biological product and which comprises one or more post-translational modifications as compared to the reference medicinal product or reference biological product, wherein the reference medicinal product or reference biological product is nivolumab, pembrolizumab, pidilizumab, durvalumab, atezolizumab, or avelumab. In some embodiments, the one or more post-translational modifications are selected from one or more of: glycosylation, oxidation, deamidation, and truncation. In some embodiments, the biosimilar is an anti-PD1 or anti-PD-L1 antibody authorized or submitted for authorization, wherein the anti-PD1 or anti-PD-L1 antibody is provided in a formulation which differs from the formulations of a reference medicinal product or reference biological product, wherein the reference medicinal product or reference biological product is nivolumab, pembrolizumab, pidilizumab, durvalumab, atezolizumab, or avelumab. The anti-PD1 or anti-PD-L1 antibody may be authorized by a drug regulatory authority such as the U.S. FDA and/or the European Union's EMA. In some embodiments, the biosimilar is provided as a composition which further comprises one or more excipients, wherein the one or more excipients are the same or different to the excipients comprised in a reference medicinal product or reference biological product, wherein the reference medicinal product or reference biological product is nivolumab, pembrolizumab, pidilizumab, durvalumab, atezolizumab, or avelumab. In some embodiments, the biosimilar comprises one or more excipients selected from tris-hydrochloride, sodium chloride, mannitol, pentetic acid, polysorbate 80, sodium hydroxide, and hydrochloric acid.

[1528] In an embodiment, the invention provides a method of treating a cancer or an immune, autoimmune, or inflammatory disease in a human comprising the step of administering to said human a BTK inhibitor, or a pharmaceutically acceptable salt or ester, prodrug, cocrystal, solvate or hydrate thereof, and a molecule selected from the group consisting of a GITR binding molecule, a 4-1BB agonist, an OX40 agonist, and combinations thereof, including an antibody, antibody fragment, derivative, conjugate, variant, radioisotope-labeled complex, and biosimilar thereof, and further comprising the step of administering an PD-1 or PD-L1 inhibitor, or an antigen-binding fragment, derivative, conjugate, variant, or biosimilar thereof. In an embodiment, the BTK inhibitor is a compound selected from the group consisting of Formula (2), Formula (10), and Formula (21); the GITR binding molecule is a compound selected from the group consisting of TRX518, 6C8, 36E5, 3D6, 61G6, 6H6, 61F6, 1D8, 17F10, 35D8, 49A1, 9E5, 31H6, 1D7, 33C9, 33F6, 34G4, 35B10, 41E11, 41G5, 42A11, 44C1, 45A8, 46E11, 48H12, 48H7, 49D9, 49E2, 48A9, 5H7, 7A10, 9H6, and fragments, derivatives, conjugates, variants, and biosimilars thereof; the 4-1BB agonist is selected from the group consisting of PF-05082566 (Pfizer), 1D8, 3Elor, 4B4 (BioLegend 309809), H4-1BB-M127 (BD Pharmingen 552532), BBK2 (Thermo Fisher MS621PABX), 145501 (Leinco Technologies B591), antibody produced by cell line deposited as ATCC No. HB-11248, 5F4 (BioLegend 31 1503), C65-485 (BD Pharmingen 559446), 20H4.9-IgG4 (10C7 or BMS-663513 (urelumab)), 20H4.9-IgG1 (BMS-663031), 4E9, BMS-554271, BMS-469492, 3H3, BMS-469497, 3E1, 53A2, and 3B8 and fragments, derivatives, conjugates, variants, and biosimilars thereof; the OX40 agonist is selected from the group consisting of MEDI6469 (MedImmune), MEDI0562 (MedImmune), MEDI6383 (MedImmune), MOXR0916 (Genentech), GSK3174998 and fragments, derivatives, conjugates, variants, and biosimilars thereof; and the PD-1 or PD-L1 inhibitor is selected from the group consisting of nivolumab, pembrolizumab, pidilizumab, durvalumab, atezolizumab, avelumab, and antigen-binding fragments, variants, conjugates, or biosimilars thereof.

[1529] While preferred embodiments of the invention are shown and described herein, such embodiments are provided by way of example only and are not intended to otherwise limit the scope of the invention. Various alternatives to the described embodiments of the invention may be employed in practicing the invention.

### EXAMPLES

[1530] The embodiments encompassed herein are now described with reference to the following examples. These examples are provided for the purpose of illustration only and the disclosure encompassed herein should in no way be construed as being limited to these examples, but rather should be construed to encompass any and all variations which become evident as a result of the teachings provided herein.

### Example 1—Preclinical Characteristics of BTK Inhibitors

[1531] The BTK inhibitor ibrutinib (Formula (10), (1-[(3R)-3-[4-amino-3-(4-phenoxyphenyl)-1H-pyrazolo[3,4-d]pyrimidin-1-yl]piperidin-1-yl]prop-2-en-1-one) is a first-generation BTK inhibitor. In clinical testing as a monotherapy in subjects with hematologic malignancies, ibrutinib was generally well tolerated at dose levels through 840 mg (the highest dose tested). Advani, et al., J. Clin. Oncol. 2013, 31, 88-94; Byrd, et al., N. Engl. J. Med. 2013, 369, 32-42; Wang, et al., N. Engl. J. Med. 2013, 369, 507-16. No maximum tolerated dose (MTD) was apparent within the tested dose range. Furthermore, subjects typically found the drug tolerable over periods extending to >2 years. No subject had tumor lysis syndrome. No overt pattern of myelosuppression was associated with ibrutinib treatment. No drug-related reductions in circulating CD4⁺ T cells or serum immunoglobulins were noted. Adverse events with an apparent relationship to study drug included diarrhea and rash.

[1532] In subjects with heavily pretreated non-Hodgkin lymphoma (NHL), ibrutinib showed substantial antitumor activity, inducing durable regressions of lymphadenopathy and splenomegaly in most subjects. Improvements in disease-associated anemia and thrombocytopenia were observed. The pattern of changes in subjects with CLL was notable. Single-active pharmaceutical ingredient ibrutinib caused rapid and substantial reductions in lymph node size concomitant with a redistribution of malignant sites into the peripheral blood. An asymptomatic absolute lymphocyte count (ALC) increase was observed that was maximal during the first few months of treatment and generally decreased thereafter but could be persistent in some subjects or could be seen repeatedly in subjects who had interruption and resumption of drug therapy.

[1533] Collectively, these data with ibrutinib support the potential benefits of selective BTK inhibition in the treatment of subjects with relapsed lymphoid cancers. However, while highly potent in inhibiting BTK, ibrutinib has also shown in vitro activity against other kinases with a cysteine in the same position as Cys481 in BTK, to which the drug covalently binds. For example, ibrutinib inhibits epidermal growth factor receptor (EGFR), which may be the cause of ibrutinib-related diarrhea and rash. In addition, it is a substrate for both cytochrome P450 (CYP) enzymes 3A4/5 and 2D6, which increases the possibility of drug-drug interactions. These liabilities support the development of alternative BTK inhibitors for use in the therapy of lymphoid cancer.

[1534] The preclinical selectivity and potency characteristics of the second-generation BTK inhibitor of Formula (2) were compared to the first-generation BTK inhibitor of Formula (10) (ibrutinib). In Table 18, a kinome screen (performed by Life Technologies or based on literature data) is shown that compares these compounds.

TABLE 18
Kinome Screen for BTK Inhibitors (IC₅₀, nM)

| | | Ibrutinib (Formula |
|---|---|---|
| 3F-Cys Kinase | Formula (2) | (10)) |
| Btk | 3.1 | 0.5 |
| Tec | 29 | 78 |
| Bmx | 39 | 0.80 |
| ITK | >1000 | 10.7 |
| Txk | 291 | 2.0 |
| EGFR | >1000 | 5.6 |
| ErbB2 | 912 | 9.4 |
| ErbB4 | 13.2 | 2.7 |
| Blk | >1000 | 0.5 |
| JAK-3 | >1000 | 16.1 |

[1535] The results shown in Table 18 are obtained from a 10 point biochemical assay generated from 10 point concentration curves. The BTK inhibitor of Formula (2) shows much greater selectivity for BTK compared to other kinases than ibrutinib.

[1536] A comparison of the in vivo potency results for the BTK inhibitors of Formula (2) and ibrutinib is shown in FIG. 1. CD86 and CD69 are cell surface proteins that are BCR activation markers. To obtain the in vivo potency results, mice were gavaged at increasing drug concentration and sacrificed at one time point (3 hours post-dose). BCR was stimulated with IgM and the expression of activation marker CD69 and CD86 are monitored by flow cytometry to determine EC₅₀ values.

[1537] In vitro and in vivo safety pharmacology studies with Formula (2) have demonstrated a favorable nonclinical safety profile. When screened at 10 μM in binding assays evaluating interactions with 80 known pharmacologic targets such as G-protein-coupled receptors, nuclear receptors, proteases, and ion channels, Formula (2) shows significant activity only against the A3 adenosine receptor; follow-up dose-response experiments indicated an IC₅₀ of 2.7 μM, suggesting a low clinical risk of off-target effects. Formula (2) at 10 μM showed no inhibition of in vitro EGFR phosphorylation in an A431 human epidermoid cancer cell line whereas ibrutinib had an IC₅₀ of 66 nM. The in vitro effect of Formula (2) on human ether-á-go-go-related gene (hERG) channel activity was investigated in vitro in human embryonic kidney cells stably transfected with hERG. Formula (2) inhibited hERG channel activity by 25% at 10 μM, suggesting a low clinical risk that Formula (2) would induce clinical QT prolongation as predicted by this assay. Formula (2) was well tolerated in standard in vivo Good Laboratory Practices (GLP) studies of pharmacologic safety. A functional observation battery in rats at doses through 300 mg/kg (the highest dose level) revealed no adverse effects on neurobehavioral effects or body temperature at any dose level. A study of respiratory function in rats also indicated no treatment-related adverse effects at doses through 300 mg/kg (the highest dose level). In a cardiovascular function study in awake telemeterized male beagle dogs, single doses of Formula (2) at dose levels through 30 mg/kg (the highest dose level) induced no meaningful changes in body temperature, cardiovascular, or electrocardiographic (ECG) (including QT interval) parameters. The results suggest that Formula (2) is unlikely to cause serious off-target effects or adverse effects on critical organ systems.

[1538] The drug-drug interaction potential of Formula (2) was also evaluated. In vitro experiments evaluating loss of parent drug as catalyzed by CYPs indicated that Formula (2) is metabolized by CYP3A4. In vitro metabolism studies using mouse, rat, dog, rabbit, monkey, and human hepatocytes incubated with ¹⁴C-labeled Formula (2) indicated two mono-oxidized metabolites and a glutathione conjugate. No unique human metabolite was identified. Preliminary evaluations of metabolism in the plasma, bile, and urine of rats, dogs, and monkeys indicated metabolic processes of oxidation, glutathione binding, and hydrolysis. It was shown that Formula (2) binds to glutathione but does not deplete glutathione in vitro. Nonclinical CYP interaction studies data indicate that Formula (2) is very unlikely to cause clinical drug-drug interactions through alteration of the metabolism of drugs that are substrates for CYP enzymes.

[1539] The in vitro potency in whole blood of Formula (2), Formula (10) (ibrutinib), and Formula (17) (CC-292) in inhibiting signals through the B cell receptor was also assessed. Blood from four healthy donors was incubated for 2 hours with the compounds shown over a concentration range, and then stimulated with anti-human IgD (10 μg/mL) for 18 hours. The mean fluorescent intensity (MFI) of CD69 (and CD86, data not shown) on gated CD19+ B cells was measured by flow cytometry. MFI values were normalized so that 100% represents CD69 level in stimulated cells without inhibitor, while 0% represents the unstimulated/no drug condition. The results are shown in FIG. 2. The EC₅₀ values obtained were 8.2 nM (95% confidence interval: 6.5-10.3), 6.1 nM (95% confidence interval: 5.2-7.2), and 121 nM (95% confidence interval: 94-155) for Formula (2), Formula (10) (ibrutinib), and Formula (17) (CC-292), respectively.

[1540] The EGF receptor phosphorylation in vitro was also determined for Formula (2) and Formula (10) (ibrutinib). Epidermoid carcinoma A431 cells were incubated for 2h with a dose titration of Formula (2) or Formula (10) (ibrutinib), before stimulation with EGF (100 ng/mL) for 5 min to induce EGFR phosphorylation (p-EGFR). Cells were fixed with 1.6% paraformaldehyde and permeabilized with 90% MeOH. Phosphoflow cytometry was performed with p-EGFR (Y1069). MFI values were normalized so that 100% represents the p-EGFR level in stimulated cells without inhibitor, while 0% represents the unstimulated/no drug condition. The results are shown in FIG. 3. EGF-induced p-EGFR inhibition was determined to be 7% at 10 μM for Formula (2), while ibrutinib has an EC₅₀ of 66 nM. The much more potent inhibition of EGF-induced p-EGFR by ibrutinib may be associated with increased side effects including diarrhea and rash.

### Example 2—BTK Inhibitory Effects on Solid Tumor Microenvironment in an Ovarian Cancer Model

[1541] The ID8 syngeneic orthotopic ovarian cancer murine model was used to investigate the therapeutic efficacy of the BTK inhibitor of Formula (2) through treatment of the solid tumor microenvironment. Human ovarian cancer models, including the ID8 syngeneic orthotopic ovarian cancer model and other animal models, are described in Fong and Kakar, J. Ovarian Res. 2009, 2, 12; Greenaway, et al., Gynecol. Oncol. 2008, 108, 385-94; Urzua, et al., Tumour Biol. 2005, 26, 236-44; Janat-Amsbury, et al., Anticancer Res. 2006, 26, 3223-28; Janat-Amsbury, et al., Anticancer Res. 2006, 26, 2785-89. Animals were treated with vehicle or Formula (2), 15 mg/kg/BID given orally. The results of the study are shown in FIG. 8, FIG. 9, FIG. 10, FIG. 11, FIG. 12, FIG. 13, FIG. 14, and FIG. 15.

[1542] FIG. 8 and FIG. 9 demonstrate that the BTK inhibitor of Formula (2) impairs ID8 ovarian cancer growth in the ID8 syngeneic murine model. FIG. 10 shows that tumor response to treatment with the BTK inhibitor of Formula (2) correlates with a significant reduction in immunosuppressive tumor-associated lymphocytes in tumor-bearing mice. FIG. 11 shows treatment with the BTK inhibitor of Formula (2) impairs ID8 ovarian cancer growth (through reduction in tumor volume) in the syngeneic murine model. FIG. 12 and FIG. 13 show that the tumor response induced by treatment with the BTK inhibitor of Formula (2) correlates with a significant reduction in immunosuppressive B cells, including Bregs, in tumor-bearing mice. FIG. 14 and FIG. 15 show that the tumor response induced by treatment with the BTK inhibitor of Formula (2) correlates with a significant reduction in immunosuppressive tumor associated Tregs and an increase in CD8⁺ T cells.

[1543] The results shown in FIG. 8 to FIG. 15 illustrate the surprising performance of the BTK inhibitor of Formula (2) in modulating tumor microenvironment in a model predictive of efficacy of a treatment for ovarian cancer in humans.

### Example 3—BTK Inhibitory Effects on Solid Tumor Microenvironment in a KPC Pancreatic Cancer Model

[1544] Given the potential for BTK inhibition to affect TAMs and MDSCs, single-active pharmaceutical ingredient Formula (2) was evaluated in mice with advanced pancreatic cancer arising as the result of genetic modifications of oncogenes KRAS and p53, and the pancreatic differentiation promoter PDX-1 (KPC mice). The KPC mouse model recapitulates many of the molecular, histopathologic, and clinical features of human disease (Westphalen and Olive, Cancer J. 2012, 18, 502-510). Mice were enrolled after identification of spontaneously appearing tumors in the pancreas that were ≥100 mm³ (as assessed by high-resolution ultrasonography). Mice were treated with (1) vehicle (N=6); or (2) Formula (2), 15 mg/kg BID given orally (N=6).

[1545] As shown in FIG. 16, treatment with single-active pharmaceutical ingredient Formula (2) substantially slowed pancreatic cancer growth and increased animal survival. With vehicle, tumor volumes predose averaged 152 mm³, and at day 28 averaged 525 mm³. In the cohort treated with Formula (2), tumor volumes predose averaged 165 mm³, and at day 28 averaged 272 mm³, indicating significant improvement. With vehicle, survival at day 14 was 5/6 animals, and at day 28 was 0/6 animals. With Formula (2), survival at day 14 was 6/6 animals, and at day 28 was 5/6 animals.

[1546] Analysis of tumor tissues showed that immunosuppressive TAMs (CD11b⁺Ly6ClowF4/80⁺Csf1r⁺), MDSCs (Gr1⁺Ly6CHi), and Tregs (CD4⁺CD25⁺FoxP3⁺) were significantly reduced with Formula (2) treatment (FIG. 17, FIG. 18, and FIG. 19). As expected, the decrease in these immunosuppressive cell subsets correlated with a significant increase in CD8⁺ cells (FIG. 20).

### Example 4—BTK Inhibitory Effects on Solid Tumor Microenvironment in a Non-Small Cell Lung Cancer (NSCLC) Model

[1547] A genetic tumor model of NSCLC (KrasLA2) was studied as a model for lung cancer using the treatment schema shown in FIG. 21. The model is designed to have sporadic expression in single cells of G12D mutant Kras off its own promoter triggered by spontaneous intrachromosomal recombination. Johnson, et al., Nature 2001, 410, 1111-16. While the mutant Kras protein is expressed in a few cells in all tissues, tumor development is seen only in the lung at high penetrance. Mice treated with Formula (2) showed a significant decrease in tumor volumes versus vehicle (FIG. 22) and fewer overall tumors with dosing of 15 mg/kg. The effects on TAMs (FIG. 23), MDSCs (FIG. 24), Tregs (FIG. 25), and CD8+ cells (FIG. 26) were consistent with suppression of the solid tumor microenvironment as demonstrated previously.

### Example 5—BTK Inhibitory Effects on MDSCs in the Solid Tumor Microenvironment

[1548] A molecular probe assay was used to calculate the percent irreversible occupancy of total BTK. MDSCs were purified from tumor bearing PDA mice (as described previously) dosed at 15 mg/kg BID of Formula (2). Complete BTK occupancy is observed for both the granulocytic and monocytic MDSC compartments on Day 8 at 4 hours post dose (N=5). The results are shown in FIG. 27.

### Example 6—Effects of BTK Inhibitors on Antibody-Dependent NK Cell Mediated Cytotoxicity Using Rituximab

[1549] Rituximab-combination chemotherapy is today's standard of care in CD20⁺ B-cell malignancies. Previous studies investigated and determined that ibrutinib antagonizes rituximab antibody-dependent cell-mediated cytotoxicity (ADCC) mediated by NK cells. This may be due to ibrutinib's secondary irreversible binding to interleukin-2 inducible tyrosine kinase (ITK) which is required for FcR-stimulated NK cell function including calcium mobilization, granule release, and overall ADCC. Kohrt, et al., Blood 2014, 123, 1957-60.

[1550] In this example, the effects of Formula (2) and ibrutinib on NK cell function were evaluated in cell lines and primary NK cells from healthy volunteers and CLL patients. In summary, the results show that the activation of NK cells co-cultured with antibody-coated target cells was strongly inhibited by ibrutinib. The secretion of IFN-T was reduced by 48% (p=0.018) and 72% (p=0.002) in cultures treated with ibrutinib at 0.1 and 1.0 μM respectively and NK cell degranulation was significantly (p=0.002) reduced, compared with control cultures. Formula (2) treatment at 1 μM, a clinically relevant concentration, did not inhibit IFN-γ or NK cell degranulation. Rituximab-mediated ADCC was evaluated in NK cells from healthy volunteers as well as assays of NK cells from CLL patients targeting autologous CLL cells. In both cases, ADCC was not inhibited by Formula (2) treatment at 1 μM. In contrast, addition of ibrutinib to the ADCC assays strongly inhibited the rituximab-mediated cytotoxicity of target cells, and no increase over natural cytotoxicity was observed at any rituximab concentration. This result indicates that the combination of rituximab and Formula (2) provides an unexpected benefit in the treatment of B cell malignancies and other diseases where NK cell inhibition is undesirable.

[1551] BTK is a non-receptor enzyme in the Tec kinase family that is expressed among cells of hematopoietic origin, including B cells, myeloid cells, mast cells and platelets, where it regulates multiple cellular processes including proliferation, differentiation, apoptosis, and cell migration. Khan, Immunol Res. 2001, 23, 147-56; Mohamed, et al., Immunol Rev. 2009, 228, 58-73; Bradshaw, Cell Signal. 2010, 22, 1175-84. Functional null mutations of BTK in humans cause the inherited disease, X linked agammaglobulinemia, which is characterized by a lack of mature peripheral B cells. Vihinen, et al., Front Biosci. 2000, 5, D917-28. Conversely, BTK activation is implicated in the pathogenesis of several B-cell malignancies. Herman, et al., Blood 2011, 117, 6287-96; Kil, et al., Am. J. Blood Res. 2013, 3, 71-83; Tai, et al., Blood 2012, 120, 1877-87; Buggy, and Elias, Int. Rev. Immunol. 2012, 31, 119-32 (Erratum in: Int. Rev. Immunol. 2012, 31, 428). In addition, BTK-dependent activation of mast cells and other immunocytes in peritumoral inflammatory stroma has been shown to sustain the complex microenvironment needed for lymphoid and solid tumor maintenance. Soucek, et al., Neoplasia 2011, 13, 1093-100; Ponader, et al., Blood 2012, 119, 1182-89; de Rooij, et al., Blood 2012, 119, 2590-94. Taken together, these findings have suggested that inhibition of BTK may offer an attractive strategy for treating B cell neoplasms, other hematologic malignancies, and solid tumors.

[1552] Ibrutinib (PCI-32765, IMBRUVICA), is a first-in-class therapeutic BTK inhibitor. This orally delivered, small-molecule drug is being developed by Pharmacyclics, Inc. for the therapy of B cell malignancies. As described above, in patients with heavily pretreated indolent non-Hodgkin lymphoma (iNHL), mantle cell lymphoma (MCL), and CLL, ibrutinib showed substantial antitumor activity, inducing durable regressions of lymphadenopathy and splenomegaly in the majority of patients. Advani, et al., J. Clin. Oncol. 2013, 31, 88-94; Byrd, et al., N. Engl. J. Med. 2013, 369, 32-42; Wang, et al., N. Engl. J. Med. 2013, 369, 507-16; O'Brien, et al., Blood 2012, 119, 1182-89. The pattern of changes in CLL was notable. Inhibition of BTK with ibrutinib caused rapid and substantial mobilization of malignant CLL cells from tissue sites into the peripheral blood, as described in Woyach, et al., Blood 2014, 123, 1810-17; this effect was consistent with decreased adherence of CLL to protective stromal cells. Ponader, et al., Blood 2012, 119, 1182-89; de Rooij, et al., Blood 2012, 119, 2590-94. Ibrutinib has been generally well tolerated. At dose levels associated with total BTK occupancy, no dose-limiting toxicities were identified and subjects found the drug tolerable over periods extending to >2.5 years.

[1553] Given the homology between BTK and ITK, it has been recently confirmed that ibrutinib irreversibly binds ITK. Dubovsky, et al., Blood 2013, 122, 2539-2549. ITK expression in Fc receptor (FcR)-stimulated NK cells leads to increased calcium mobilization, granule release, and cytotoxicity. Khurana, et al., J. Immunol. 2007, 178, 3575-3582. As rituximab is a backbone of lymphoma therapy, with mechanisms of action including ADCC, as well as direct induction of apoptosis and complement-dependent cytotoxicity, and FcR stimulation is requisite for ADCC, we investigated if ibrutinib or Formula (2) (the latter lacking ITK inhibition) influenced rituximab's anti-lymphoma activity in vitro by assessing NK cell IFN-γ secretion, degranulation by CD107a mobilization, and cytotoxicity by chromium release using CD20⁺ cell lines and autologous patient samples with chronic lymphocytic leukemia (CLL).

[1554] Formula (2) is a more selective inhibitor than ibrutinib, as shown previously. Formula (2) is not a potent inhibitor of ITK in contrast to ibrutinib, as shown herein (see, e.g., Table 18). ITK is required for FcR-stimulated NK cell function including calcium mobilization, granule release, and overall ADCC. Anti-CD20 antibodies like rituximab are currently the standard of care for the treatment of many CD20⁺ B cell malignancies, often as part of combination regimens with older chemotherapeutic agents. The potential of ibrutinib or Formula (2) to antagonize ADCC was evaluated in vitro. Previous studies have determined that ibrutinib undesirably antagonizes rituximab ADCC effects mediated by NK cells. Kohrt, et al., Blood 2014, 123, 1957-60. We hypothesized that the BTK inhibitor of Formula (2), which does not have activity against ITK, may preserve NK cell function and therefore synergize rather than antagonize rituximab-mediated ADCC. Rituximab-dependent NK-cell mediated cytotoxicity was assessed using lymphoma cell lines as well as autologous CLL tumor cells.

[1555] Cell culture conditions were as follows. Cell lines Raji and DHL-4 were maintained in RPMI 1630 supplemented with fetal bovine serum, L-glutamine, 2-mercaptoethanol and penicillin-streptomycin at 37° C. in a humidified incubator. The HER18 cells were maintained in DEM supplemented with fetal bovine serum, penicillin-streptomycin and. Prior to assay, HER18 cells were harvested using trypsin-EDTA, washed with phosphate-buffered saline (PBS) containing 5% serum and viable cells were counted. For culture of primary target cells, peripheral blood from CLL patients was subject to density centrifugation to obtain peripheral blood mononuclear cells (PBMC). Cell preparations were washed and then subject to positive selection of CD5⁺CD19⁺ CLL cells using magnetic beads (MACS, Miltenyi Biotech). Cell preparations were used fresh after selection. NK cells from CLL patients and healthy volunteers were enriched from peripheral blood collected in sodium citrate anticoagulant tubes and then subject to density centrifugation. Removal of non NK cells was performed using negative selection by MACS separation. Freshly isolated NK cells were washed three times, enumerated, and then used immediately for ADCC assays.

[1556] Cytokine secretion was determined as follows. Rituximab and trastuzumab-dependent NK-cell mediated degranulation and cytokine release were assessed using lymphoma and HER2+ breast cancer cell lines (DHL-4 and HER18, respectively). Target cells were cultured in flat-bottom plates containing 10 μg/mL of rituximab (DHL-4) or trastuzumab (HER18) and test articles (0.1 or 1 μM ibrutinib, 1 μM Formula (2), or DMSO vehicle control). NK cells from healthy donors were enriched as described above and then added to the target cells and incubated for 4 hours at 37° C. Triplicate cultures were performed on NK cells from donors. After incubation, supernatants were harvested, centrifuged briefly, and then analyzed for interferon-γ using an enzyme-linked immunosorbent assay (ELISA) (R&D Systems, Minneapolis, Minn., USA).

[1557] Lytic granule release was determined as follows. NK cells from healthy donors were enriched and cultured in the presence of target cells, monoclonal antibodies and test articles as described above. After 4 hours, the cultures were harvested and cells were pelleted, washed, and then stained for flow cytometry evaluation. Degranulation was evaluated via by flow cytometery by externalization of CD107a, a protein normally present on the inner leaflet of lytic granules, and gating on NK cells (CD3-CD16⁺ lymphocytes). The percentage of CD107a positive NK cells was quantified by comparison with a negative control (isotype control, unstained cells/FMO). Control cultures (NK cells cultured without target cells, or NK, target cell co-cultures in the absence of appropriate monoclonal antibody) were also evaluated; all experiments were performed in triplicate.

[1558] ADCC assays were performed as follows. Briefly, target cells (Raji or primary CLL) were labeled by incubation at 37° C. with 100 μCi ⁵¹Cr for 4 hours prior to co-culture with NK cells. Cells were washed, enumerated, and then added in triplicate to prepared 96-well plates containing treated NK cells at an effector:target (E:T) ratio of 25:1. Rituximab (Genentech) was added to ADCC wells at concentrations of 0.1, 1.0 or 10 μg/mL and the assays were briefly mixed and then centrifuged to collect cells at the bottom of the wells. The effect of NK cell natural cytotoxicity was assessed in wells containing no rituximab. Cultures were incubated at 37° C. for 4 hours, and then centrifuged. Supernatants were harvested and ⁵¹Cr release was measured by liquid scintillation counting. All experiments were performed in triplicate.

[1559] Ibrutinib inhibited rituximab-induced NK cell cytokine secretion in a dose-dependent manner (0.1 and 1 μM) (FIG. 28: 48% p=0.018; 72% p=0.002, respectively). At 1 μM, Formula (2) did not significantly inhibit cytokine secretion (FIG. 28: 3.5%). Similarly, Formula (2) had no inhibitory effect on rituximab-stimulated NK cell degranulation (<2%) while ibrutinib reduced degranulation by ˜50% (p=0.24, FIG. 29). Formula (2) had no inhibitory effect while ibrutinib prevented trastuzumab-stimulated NK cell cytokine release and degranulation by ˜92% and ˜84% at 1 μM, respectively (FIG. 28 and FIG. 29: ***p=0.004, **p=0.002).

[1560] In Raji cell samples, ex vivo NK cell activity against autologous tumor cells was not inhibited by addition of Formula (2) at 1 μM, and increased cell lysis was observed with increasing concentrations of rituximab at a constant E:T ratio (FIG. 30). In primary CLL samples, ex vivo NK cell activity against autologous tumor cells was not inhibited by addition of Formula (2) at 1 μM, and increased cell lysis was observed with increasing concentrations of rituximab at a constant E:T ratio (FIG. 31). In contrast, addition of 1 μM ibrutinib completely inhibited ADCC, with less than 10% cell lysis at any rituximab concentration and no increase in cell lysis in the presence of rituximab, compared with cultures without rituximab. A graph highlighting the significant differences between Formula (2) and ibrutinib is shown in FIG. 32 (where “Ab” refers to rituximab). The difference between Formula (2) and ibrutinib was highly significant in this assay (p=0.001).

[1561] In ADCC assays using healthy donor NK cells, antibody-dependent lysis of rituximab-coated Raji cells was not inhibited by addition of 1 μM of Formula (2) (FIG. 32). In these experiments, addition of rituximab stimulated a 5- to 8-fold increase in cell lysis at 0.1 and 1 μg/mL, compared with low (<20%) natural cytotoxicity in the absence of rituximab. As previously reported, addition of 1 μM ibrutinib strongly inhibited the antibody-dependent lysis of target cells, with less than 20% cell lysis at all rituximab concentrations and no increase in ADCC with at higher rituximab concentrations.

[1562] Ibrutinib is clinically effective as monotherapy and in combination with rituximab, despite inhibition of ADCC in vitro and in vivo murine models due to ibrutinib's secondary irreversible binding to ITK. Preclinically, the efficacy of therapeutics which do not inhibit NK cell function, including Formula (2), is superior to ibrutinib. These results provide support for the unexpected property of Formula (2) as a synergistic and superior active pharmaceutical ingredient than ibrutinib to use in combinations with antibodies that have ADCC as a mechanism of action. The improved performance of Formula (2) in combination with anti-CD20 antibody therapies is expected to extend to its use in combination with PD-1/PD-L1 inhibitors in both hematological malignancies and solid tumors, as these combinations would also benefit from reduced inhibition of NK cell function.

### Example 7—Effects of BTK Inhibition on Antibody-Dependent NK Cell Mediated Cytotoxicity Using Obinutuzumab

[1563] It has been shown above that ibrutinib undesirably antagonizes rituximab ADCC effects mediated by NK cells, and that Formula (2) does not antagonize rituximab ADCC effects and instead allows for a synergistic combination. As noted previously, this may be due to ibrutinib's secondary irreversible binding to ITK, which is required for FcR-stimulated NK cell function including calcium mobilization, granule release, and overall ADCC. Kohrt, et al., Blood 2014, 123, 1957-60. The potential for ibrutinib antagonization of obinutuzumab (GA-101) ADCC as mediated by NK cells was also explored and compared to the effects of Formula (2).

[1564] The NK cell degranulation/ADCC assay was performed using a whole blood assay with CLL targets added to normal donor whole blood, in the presence or absence of different doses of Formula (2) and ibrutinib, followed by opsonization with the anti-CD20 antibody obinutuzumab. Ibrutinib was used as a control, and two blinded samples of BTK inhibitors, Formula (2) and a second sample of ibrutinib, were provided to the investigators. Degranulation in whole blood was performed as follows. CLL targets (MEC-1 cells) were expanded in RPMI 1640 medium (Life Technologies, Inc.) with 10% fetal bovine serum (FBS). Exponentially growing cells were used. On the day of the experiment, 8 mL of blood was drawn from a normal volunteer into a test tube containing desirudin to obtain a final concentration of 50 μg/mL. A white blood cell (WBC) count of whole blood was performed. MEC-1 cells were re-suspended at the concentration of WBC in whole blood (e.g., if 6×10⁶ WBC/mL was measured, MEC-1 cells were re-suspended at 6×10⁶ cells/mL, to allow for a final WBC:MEC-1 cell ratio of 1:1). The ibrutinib control and two blinded BTK inhibitors were diluted in X-VIVO 15 serum-free hematopoietic cell medium (Lonza Group, Ltd.) to concentrations of 200 μM, 20 μM and 2 μM. 170 μL aliquots of unmanipulated whole blood were incubated with 10 μL BTK inhibitors or X-VIVO 15 medium for one hour into a plate. Cetuximab and obinutuzumab (GA-101) were diluted in X-VIVO 15 medium to a concentration of 20 μg/mL. Equal volumes of MEC-1 cells and antibodies were incubated for 5 minutes. After incubation, 20 μL of MEC-1 cells and antibodies was added to whole blood and the BTK inhibitors/X-VIVO 15 medium (for a final volume of 200 μL). The samples were placed in a 5% CO₂ incubator for 4 hours at 37° C. The experimental conditions thus achieved a WBC:MEC-1 cell ratio of 1:1, with final concentrations of the BTK inhibitors in the assay of 10 μM, 1 μM and 0.1 μM and final concentrations of the antibodies of 1 μg/mL.

[1565] After 4 hours, the samples were mixed gently and 50 μL aliquots were removed from each well and placed in fluorescence-activated cell sorting (FACS) test tubes. A 20 μL aliquot of anti-CD56-APC antibody and anti-CD107a-PE antibody was added. The samples were incubated for 20 minutes at room temperature in the dark. An aliquot of 2 mL of FACS lysing solution (BD Biosceinces) was added. The samples were again incubated for 5 minutes, and then centrifuged at 2000 rpm for 5 minutes. Supernatant was discarded and the cell pellet was resuspended in 500 μL of PBS. The samples were analyzed on the flow cytometer for CD107a⁺ NK cells (CD56⁺).

[1566] The NK cell degranulation results are summarized in FIG. 33 for n=3 experiments, which shows the effects on whole blood after pretreatment for 1 hour with the BTK inhibitors at the concentrations shown and subsequent stimulation with MEC-1 opsonised with obinutuzumab or cetuximab at 1 μg/mL for 4 hours. A strong reduction in the percentage of CD56⁺/CD107a⁺ NK cells is observed using ibrutinib (both as a control and blinded BTK inhibitor), which indicates that ibrutinib undesirably antagonizes NK cells. In contrast, Formula (2) shows little antagonism towards NK cells, and had a minimal effect on obinutuzumab-stimulated NK cell degranulation while ibrutinib reduced obinutuzumab-stimulated NK degranulation by greater than 40%. These results support the synergistic combination of obinutuzumab and Formula (2) in treatment of human B cell malignancies.

### Example 8—Effects of BTK Inhibition on Generalized NK Cell Mediated Cytotoxicity

[1567] An assay was performed to assess the effects of BTK inhibition using Formula (2) on generalized NK killing (non-ADCC killing). The targets (K562 cells) do not express major histocompatibility complex (MHC) class I, so they do not inactivate NK cells. Target cells were grown to mid-log phase, and 5×10⁵ cells were labeled in 100 μL of assay medium (IMDM with 10% FCS and penicillin/streptomycin) with 100 μCi of ⁵¹Cr for 1 hour at 37° C. Cells were washed twice and resuspended in assay medium. A total of 5000 target cells/well was used in the assay. Effector cells were resuspended in assay medium, distributed on a V-bottom 96-well plate, and mixed with labeled target cells at 40:1 E:T ratios. Maximum release was determined by incubating target cells in 1% Triton X-100. For spontaneous release, targets were incubated without effectors in assay medium alone. After a 1 minute centrifugation at 1000 rpm, plates were incubated for 4 and 16 hours at 37° C. Supernatant was harvested and ⁵¹Cr release was measured in a gamma counter. Percentage of specific release was calculated as (experimental release-spontaneous release)/(maximum release-spontaneous release)×100. The results are shown in FIG. 34.

### Example 9—Effects of BTK Inhibition on T Cells

[1568] An assay was performed to assess the effects of BTK inhibition using Formula (2) on T cells. Enriched CD4⁺ T cells are plated on 24-well culture dishes that have been precoated 2 hr with 250 μL anti-TCRβ (0.5 μg/mL) plus anti-CD28 (5 μg/mL) at 37° C. in PBS. The cells are then supplemented with media containing BTK inhibitors along with the skewing cytokines as indicated in the following. The Th17 and Treg cultures are grown for 4 days before analysis. The cells are maintained for an additional 3 days with skewing cytokines (Th17; 20 ng/mL IL-6, 0.5 ng/mL TGF-β, 5 μg/mL IL-4, 5 μg/mL IFN-γ and Treg; 0.5 ng/mL TGF-β, 5 μg/mL IL-4, 5 μg/mL IFN-γ) and are supplemented with IL2 as a growth factor.

[1569] The results are shown in FIG. 35 and FIG. 36, and further illustrate the surprising properties of Formula (2) in comparison to Formula (10) (ibrutinib). Because of the lack of activity of Formula (2) on ITK and Txk, no adverse effect on Th17 and Treg development was observed. Since ibrutinib inhibits both ITK and Txk, a profound inhibition of Th17 cells and an increase in Treg development is observed, which is comparable to the murine ITK/Txk double knock-out cells which were used as a control.

[1570] The effects of ibrutinib in comparison to Formula (2) on CD8⁺ T cell viability were also assessed. Total T cells were plated on anti-TCR and anti-CD28 coated wells in the presence of both BTK inhibitors. Neutral culture conditions were used that will not polarize T cells to a helper lineage. The cells are grown for 4 days and are then stained with anti-CD4, anti-CD8 and LIVE/DEAD reagent to determine if the drugs have selective effects on either the CD4⁺ or CD8⁺ cells. Statistical significance was calculated using the Mann Whitney T-test. The results, shown in FIG. 37, indicate that higher concentrations of Formula (10) (ibrutinib) have a strong, negative effect on CD8⁺ T cell viability that is not observed with Formula (2) at any concentration.

[1571] Without being bound by any theory, CD8⁺ T cells have two primary effector functions: (1) produce large amounts of IFN-γ (which activates macrophages), and (2) cytolytic activity. A cytotoxic T cell (CTL) assay was performed to compare the BTK inhibitors of Formula (2) and Formula (10) (ibrutinib). Effectors were prepared by generating CTL by culturing MHC mismatched splenocytes for 4 days with (500 nM) and without Formula (2) or Formula (10) (ibrutinib). The targets were B lymphoblasts from lipopolysaccharide (LPS) treated cultures. The assay was performed by incubating different ratios of effectors:targets for 4 hours. In FIG. 38, the results show that Formula (10) (ibrutinib) affects CD8⁺ T cell function as measured by % cytotoxicity. Formula (2), in contrast, has no effect on CD8⁺ T cell function as measured by % cytotoxicity relative to vehicle. The effect on CD8⁺ T cell function can also be observed by measurement of IFN-γ levels, as shown in FIG. 39, where Formula (10) (ibrutinib) again results in a significant loss of function relative to Formula (2) and vehicle.

### Example 10—Clinical Study of a BTK Inhibitor in Leukemia/Lymphoma and Effects on Bone Marrow and Lymphoid Microenvironments

[1572] Clinical studies have shown that targeting the BCR signaling pathway by inhibiting BTK produces significant clinical benefit in patients with non-Hodgkin's lymphoma (NHL). The second generation BTK inhibitor, Formula (2), achieves significant oral bioavailability and potency, and has favorable preclinical characteristics, as described above. The purpose of this study is to evaluate the safety and efficacy of the second generation BTK inhibitor of Formula (2) in treating subjects with chronic lymphocytic leukemia (CLL) and small lymphocytic lymphoma (SLL).

[1573] The design and conduct of this study is supported by an understanding of the history and current therapies for subjects with lymphoid cancers; knowledge of the activity and safety of a first-generation BTK inhibitor, ibrutinib, in subjects with hematologic cancers; and the available nonclinical information regarding Formula (2). The collective data support the following conclusions. BTK expression plays an important role in the biology of lymphoid neoplasms, which represent serious and life-threatening disorders with continuing unmet medical need. Clinical evaluation of Formula (2) as a potential treatment for these disorders has sound scientific rationale based on observations that the compound selectively abrogates BTK activity and shows activity in nonclinical models of lymphoid cancers. These data are supported by clinical documentation that ibrutinib, a first-generation BTK inhibitor, is clinically active in these diseases. Ibrutinib clinical data and Formula (2) nonclinical safety pharmacology and toxicology studies support the safety of testing Formula (2) in subjects with B cell malignancies.

[1574] The primary objectives of the clinical study are as follows: (1) establish the safety and the MTD of orally administered Formula (2) in subjects with CLL/SLL; (2) determine pharmacokinetics (PK) of orally administered Formula (2) and identification of its major metabolite(s); and (3) measure pharmacodynamic (PD) parameters including drug occupancy of BTK, the target enzyme, and effect on biologic markers of B cell function.

[1575] The secondary objective of the clinical study is to evaluate tumor responses in patients treated with Formula (2).

[1576] This study is a multicenter, open-label, nonrandomized, sequential group, dose escalation study. The following dose cohorts will be evaluated:
[1577] Cohort 1: 100 mg/day for 28 days (=1 cycle)
[1578] Cohort 2: 175 mg/day for 28 days (=1 cycle)
[1579] Cohort 3: 250 mg/day for 28 days (=1 cycle)
[1580] Cohort 4: 350 mg/day for 28 days (=1 cycle)
[1581] Cohort 5: 450 mg/day for 28 days (=1 cycle)
[1582] Cohort 6: To be determined amount in mg/day for 28 days (=1 cycle)

[1583] Each cohort will be enrolled sequentially with 6 subjects per cohort. If ≤1 dose-limiting toxicity (DLT) is observed in the cohort during Cycle 1, escalation to the next cohort will proceed. Subjects may be enrolled in the next cohort if 4 of the 6 subjects enrolled in the cohort completed Cycle 1 without experiencing a DLT, while the remaining 2 subjects are completing evaluation. If ≥2 DLTs are observed during Cycle 1, dosing at that dose and higher will be suspended and the MTD will be established as the previous cohort. The MTD is defined as the largest daily dose for which fewer than 33% of the subjects experience a DLT during Cycle 1. Dose escalation will end when either the MTD is achieved or at 3 dose levels above full BTK occupancy, whichever occurs first. Full BTK occupancy is defined as Formula (2) active-site occupancy of >80% (average of all subjects in cohort) at 24 hours postdose. Should escalation to Cohort 6 be necessary, the dose will be determined based on the aggregate data from Cohorts 1 to 5, which includes safety, efficacy, and PK/PD results. The dose for Cohort 6 will not exceed 900 mg/day.

[1584] Treatment with Formula (2) may be continued for >28 days until disease progression or an unacceptable drug-related toxicity occurs. Subjects with disease progression will be removed from the study. All subjects who discontinue study drug will have a safety follow-up visit 30 (±7) days after the last dose of study drug unless they have started another cancer therapy within that timeframe. Radiologic tumor assessment will be done at screening and at the end of Cycle 2, Cycle 4, and Cycle 12 and at investigator discretion. Confirmation of complete response (CR) will require bone marrow analysis and radiologic tumor assessment. For subjects who remain on study for >11 months, a mandatory bone marrow aspirate and biopsy is required in Cycle 12 concurrent with the radiologic tumor assessment.

[1585] All subjects will have standard hematology, chemistry, and urinalysis safety panels done at screening. This study also includes pancreatic function assessment (serum amylase and serum lipase) due to the pancreatic findings in the 28-day GLP rat toxicity study. Once dosing commences, all subjects will be evaluated for safety once weekly for the first 4 weeks, every other week for Cycle 2, and monthly thereafter. Blood samples will be collected during the first week of treatment for PK/PD assessments. ECGs will be done at screening, and on Day 1-2, 8, 15, 22, 28 of Cycle 1, Day 15 and 28 of Cycle 2, and monthly thereafter through Cycle 6. ECGs are done in triplicate for screening only. Thereafter, single ECG tests are done unless a repeat ECG testing is required.

[1586] Dose-limiting toxicity is defined as any of the following events (if not related to disease progression): (1) any Grade ≥3 non-hematologic toxicity (except alopecia) persisting despite receipt of a single course of standard outpatient symptomatic therapy (e.g., Grade 3 diarrhea that responds to a single, therapeutic dose of Imodium® would not be considered a DLT); (2) grade ≥3 prolongation of the corrected QT interval (QTc), as determined by a central ECG laboratory overread; (3) grade 4 neutropenia (absolute neutrophil count [ANC]<500/μL) lasting >7 days after discontinuation of therapy without growth factors or lasting >5 days after discontinuation of therapy while on growth factors (i.e., Grade 4 neutropenia not lasting as long as specified will not be considered a DLT), (4) grade 4 thrombocytopenia (platelet count <20,000/μL) lasting >7 days after discontinuation of therapy or requiring transfusion (i.e., Grade 4 thrombocytopenia not lasting as long as specified will not be considered a DLT), and (5) dosing delay due to toxicity for >7 consecutive days.

[1587] The efficacy parameters for the study include overall response rate, duration of response, and progression-free survival (PFS). The safety parameters for the study include DLTs and MTD, frequency, severity, and attribution of adverse events (AEs) based on the Common Terminology Criteria for Adverse Events (CTCAE v4.03) for non-hematologic AEs. Hallek, et al., Blood 2008, 111, 5446-5456.

[1588] The schedule of assessments is as follows, with all days stated in the following meaning the given day or +/−2 days from the given day. A physical examination, including vital signs and weight, are performed at screening, during cycle 1 at 1, 8, 15, 22, and 28 days, during cycle 2 at 15 and 28 days, during cycles 3 to 24 at 28 days, and at follow up (after the last dose). The screening physical examination includes, at a minimum, the general appearance of the subject, height (screening only) and weight, and examination of the skin, eyes, ears, nose, throat, lungs, heart, abdomen, extremities, musculoskeletal system, lymphatic system, and nervous system. Symptom-directed physical exams are done thereafter. Vital signs (blood pressure, pulse, respiratory rate, and temperature) are assessed after the subject has rested in the sitting position. Eastern Cooperative Oncology Group (ECOG) status is assessed at screening, during cycle 1 at 1, 8, 15, 22, and 28 days, during cycle 2 at 15 and 28 days, during cycles 3 to 24 at 28 days, and at follow up, using the published ECOG performance status indications described in Oken, et al., Am. J. Clin. Oncol. 1982, 5, 649-655. ECG testing is performed at screening, during cycle 1 at 1, 2, 8, 15, 22, and 28 days, during cycle 2 at 15 and 28 days, during cycles 3 to 24 at 28 days, and at follow up. The 12-lead ECG test will be done in triplicate (≥1 minute apart) at screening. The calculated QTc average of the 3 ECGs must be <480 ms for eligibility. On cycle 1, day 1 and cycle 1, day 8, single ECGs are done predose and at 1, 2, 4, and 6 hours postdose. The single ECG on Cycle 1 Day 2 is done predose. On cycle 1, day 15, day 22, and day 28, a single ECG is done 2 hours post-dose. Starting with cycle 2, a single ECG is done per visit. Subjects should be in supine position and resting for at least 10 minutes before study-related ECGs. Two consecutive machine-read QTc >500 ms or >60 ms above baseline require central ECG review. Hematology, including complete blood count with differential and platelet and reticulocyte counts, is assessed at screening, during cycle 1 at 1, 8, 15, 22, and 28 days, during cycle 2 at 15 and 28 days, during cycles 3 to 24 at 28 days, and at follow up. Serum chemistry is assessed at screening, during cycle 1 at 1, 8, 15, 22, and 28 days, during cycle 2 at 15 and 28 days, during cycles 3 to 24 at 28 days, and at follow up. Serum chemistry includes albumin, alkaline phosphatase, ALT, AST, bicarbonate, blood urea nitrogen (BUN), calcium, chloride, creatinine, glucose, lactate dehydrogenase (LDH), magnesium, phosphate, potassium, sodium, total bilirubin, total protein, and uric acid. Cell counts and serum immunoglobulin are performed at screening, at cycle 2, day 28, and at every 6 months thereafter until last dose and include T/B/NK/monocyte cell counts (CD3, CD4, CD8, CD14, CD19, CD19, CD16/56, and others as needed) and serum immunoglobulin (IgG, IgM, IgA, and total immunoglobulin). Bone marrow aspirates are performed at cycle 12. Pharmacodynamics samples are drawn during cycle 1 at 1, 2, and 8 days, and at follow up. On days 1 and 8, pharmacodynamic samples are drawn pre-dose and 4 hours (±10 minutes) post-dose, and on day 2, pharmacodynamic samples are drawn pre-dose. Pharmacokinetics samples are drawn during cycle 1 at 1, 2, 8, 15, 22, and 28 days. Pharmacokinetic samples for Cycle 1 Day 1 are drawn pre-dose and at 0.5, 1, 2, 4, 6 and 24 hours (before dose on Day 2) post-dose. Samples for Cycle 1 Day 8 are drawn pre-dose and at 0.5, 1, 2, 4, and 6 hours post-dose. On Cycle 1 Day 15, 22, and 28, a PK sample is drawn pre-dose and the second PK sample must be drawn before (up to 10 minutes before) the ECG acquisition, which is 2 hours postdose. Pretreatment radiologic tumor assessments are performed within 30 days before the first dose. A computed tomography (CT) scan (with contrast unless contraindicated) is required of the chest, abdomen, and pelvis. In addition, a positron emission tomography (PET) or PET/CT must done for subjects with SLL. Radiologic tumor assessments are mandatory at the end of Cycle 2 (−7 days), Cycle 4 (−7 days), and Cycle 12 (−7 days). Otherwise, radiologic tumor assessments are done at investigator discretion. A CT (with contrast unless contraindicated) scan of the chest, abdomen, and pelvis is required for subjects with CLL. In addition, a PET/CT is required in subjects with SLL. Bone marrow and radiologic assessments are both required for confirmation of a complete response (CR). Clinical assessments of tumor response should be done at the end of Cycle 6 and every 3 months thereafter. Molecular markers are measured at screening, and include interphase cytogenetics, stimulated karyotype, IgHV mutational status, Zap-70 methylation, and beta-2 microglobulin levels. Urinalysis is performed at screening, and includes pH, ketones, specific gravity, bilirubin, protein, blood, and glucose. Other assessments, including informed consent, eligibility, medical history, and pregnancy test are done at the time of screening.

[1589] The investigator rates the subject's response to treatment based on recent guidelines for CLL, as given in Hallek, et al., Blood 2008, 111, 5446-56, and for SLL, as given in Cheson, et al., J. Clin. Oncol. 2007, 25, 579-586. The response assessment criteria for CLL are summarized in Table 19.

TABLE 19
Response Assessment Criteria for CLL.

| Re- | | Bone Marrow | Nodes, Liver, |
|---|---|---|---|
| sponse | Peripheral Blood | (if performed) | and Spleen^{a} |
| CR | Lymphocytes < 4 × 10⁹/L | Normocellular < | Normal (e.g., no |
| | ANC > 1.5 × 10⁹/L^{b} | 30% | lymph nodes > |
| | Platelets > 100 × 10⁹/L^{b} | lymphocytes | 1.5 cm) |
| | Hemoglobin > 11.0 | No B-lymphoid | |
| | g/dL (untransfused)^{b} | nodules | |
| CRi | Lymphocytes < 4 × 10⁹/L | Hypocellular < | Normal (e.g., no |
| | Persistent anemia, | 30% | lymph nodes > |
| | thrombocytopenia, or | lymphocytes | 1.5 cm) |
| | neutropenia related to | | |
| | drug toxicity | | |
| PR | Lymphocytes ≥ 50% | Not assessed | ≥50% reduction |
| | decrease from baseline | | in lymph- |
| | ANC > 1.5 × 10⁹/L | | adenopathy^{c} |
| | or | | and/or in spleen |
| | Platelets > 100 × 10⁹/L | | or liver |
| | or 50% improvement | | enlargement |
| | over baseline^{b} | | |
| | or | | |
| | Hemoglobin > 11.0 g/dL | | |
| | or | | |
| | 50% improvement over | | |
| | baseline (untransfused)^{b} | | |

Abbreviations:
ANC = absolute neutrophil count;
CR = complete remission;
CRi = CR with incomplete blood count recovery;
PR = partial remission.
^{a}Computed tomography (CT) scan of abdomen pelvis, and chest is required for this evaluation
^{b}Without need for exogenous growth factors
^{c}In the sum products of ≤6 lymph nodes or in the largest diameter of the enlarged lymph node(s) detected before therapy and no increase in any lymph node or new enlarged lymph nodes

[1590] The response assessment criteria for SLL are summarized in Table 20.

TABLE 20
Response Assessment Criteria for SLL.

| Response | Definition | Nodal Masses | Spleen, Liver | Bone Marrow |
|---|---|---|---|---|
| CR | Disappearance | (a) FDG-avid or PET | Not palpable, | If infiltrate present |
| | of all evidence | positive prior to | nodules | at screening, |
| | of disease | therapy; mass of any | disappeared | infiltrate cleared on |
| | | size permitted if PET | | repeat biopsy; if |
| | | negative | | indeterminate by |
| | | (b) Variably FDG-avid | | morphology, |
| | | or PET negative; | | immunohisto- |
| | | regression to normal | | chemistry should be |
| | | size on CT | | negative |
| PR | Regression of | ≥50% decrease in SPD | ≥50% decrease | Irrelevant if |
| | measurable | of up to 6 largest | in SPD of | positive prior to |
| | disease and no | dominant masses; no | nodules (for | therapy; cell type |
| | new sites | increase in size of other | single nodule in | should be specified |
| | | nodes | greatest | |
| | | (a) FDG-avid or PET | transverse | |
| | | positive prior to | diameter); no | |
| | | therapy; ≥1 PET | increase in size | |
| | | positive at previously | of liver or | |
| | | involved site | spleen | |
| | | (b) Variably FDG-avid | | |
| | | or PET negative; | | |
| | | regression on CT | | |
| SD | Failure to | (a) FDG-avid or PET | | |
| | attain CR/PR | positive prior to | | |
| | or progressive | therapy; PET positive | | |
| | disease | at prior sites of disease, | | |
| | | and no new sites on CT | | |
| | | or PET | | |
| | | (b) Variably FDG avid | | |
| | | or PET negative; no | | |
| | | change in size of | | |
| | | previous lesions on CT | | |

Abbreviations:
CR = complete remission,
CT = computed tomography,
FDG = [¹⁸F]fluorodeoxyglucose,
PET = positron-emission tomography,
PR = partial remission,
SD = stable disease,
SPD = sum of the product of the diameters.

[1591] The PK parameters of the study are as follows. The plasma PK of Formula (2) and a metabolite is characterized using noncompartmental analysis. The following PK parameters are calculated, whenever possible, from plasma concentrations of Formula (2):
[1592] AUC₍₀₋ₜ₎: Area under the plasma concentration-time curve calculated using linear trapezoidal summation from time 0 to time t, where t is the time of the last measurable concentration (Ct),
[1593] AUC₍₀₋₂₄₎: Area under the plasma concentration-time curve from 0 to 24 hours, calculated using linear trapezoidal summation,
[1594] AUC_{(0-∞)}: Area under the plasma concentration-time curve from 0 to infinity, calculated using the formula: AUC_{(0-∞)}=AUC₍₀₋ₜ₎+Ct/λz, where λz is the apparent terminal elimination rate constant,
[1595] Cₘₐₓ: Maximum observed plasma concentration,
[1596] Tₘₐₓ: Time of the maximum plasma concentration (obtained without interpolation),
[1597] λ_{z}: Terminal elimination half-life (whenever possible),
[1598] k: Terminal elimination rate constant (whenever possible),
[1599] Cl/F: Oral clearance.

[1600] The PD parameters of the study are as follows. The occupancy of BTK by Formula (2) are measured in peripheral blood mononuclear cells (PBMCs) with the aid of a biotin-tagged Formula (2) analogue probe. The effect of Formula (2) on biologic markers of B cell function will also be evaluated.

[1601] The statistical analysis used in the study is as follows. No formal statistical tests of hypotheses are performed. Descriptive statistics (including means, standard deviations, and medians for continuous variables and proportions for discrete variables) are used to summarize data as appropriate.

[1602] The following definitions are used for the safety and efficacy analysis sets: Safety analysis set: All enrolled subjects who receive ≥1 dose of study drug; Per-protocol (PP) analysis set: All enrolled subjects who receive ≥1 dose of study drug and with ≥1 tumor response assessment after treatment. The safety analysis set will be used for evaluating the safety parameters in this study. The PP analysis sets will be analyzed for efficacy parameters in this study.

[1603] No imputation of values for missing data is performed except for missing or partial start and end dates for adverse events and concomitant medication will be imputed according to prespecified, conservative imputation rules. Subjects lost to follow-up (or drop out) will be included in statistical analyses to the point of their last evaluation.

[1604] The safety endpoint analysis was performed as follows. Safety summaries will include summaries in the form of tables and listings. The frequency (number and percentage) of treatment emergent adverse events will be reported in each treatment group by Medical Dictionary for Regulatory Activities (MedDRA) System Organ Class and Preferred Term. Summaries will also be presented by the severity of the adverse event and by relationship to study drug. Laboratory shift tables containing counts and percentages will be prepared by treatment assignment, laboratory parameter, and time. Summary tables will be prepared for each laboratory parameter. Figures of changes in laboratory parameters over time will be generated. Vital signs, ECGs, and physical exams will be tabulated and summarized.

[1605] Additional analyses include summaries of subject demographics, baseline characteristics, compliance, and concurrent treatments. Concomitant medications will be coded according to the World Health Organization (WHO) Drug Dictionary and tabulated.

[1606] The analysis of efficacy parameters was performed as follows. The point estimate of the overall response rate will be calculated for the PP analysis set. The corresponding 95% confidence interval also will be derived. The duration of overall response is measured from the time measurement criteria are met for CR or PR (whichever is first recorded) until the first date that recurrent or progressive disease is objectively documented (taking as reference for progressive disease the smallest measurements recorded since the treatment started). Kaplan-Meier methodology will be used to estimate event-free curves and corresponding quantiles (including the median). Progression-free survival is measured from the time of first study drug administration until the first date that recurrent or progressive disease is objectively documented (taking as reference for progressive disease the smallest measurements recorded since the treatment started). Kaplan-Meier methodology will be used to estimate the event-free curves and corresponding quantiles (including the median).

[1607] The study scheme is a sequential cohort escalation. Each cohort consists of six subjects. The sample size of the study is 24 to 36 subjects, depending on dose escalation into subsequent cohorts. Cohort 1 (N=6) consists of Formula (2), 100 mg QD for 28 days. Cohort 2 (N=6) consists of Formula (2), 175 mg QD for 28 days. Cohort 3 (N=6) consists of Formula (2), 250 mg QD for 28 days. Cohort 4 (N=6) consists of Formula (2), 350 mg QD for 28 days. Cohort 5 (N=6) consists of Formula (2), 450 mg QD for 28 days. Cohort 6 (N=6) consists of Formula (2), at a dose to be determined QD for 28 days. The dose level for Cohort 6 will be determined based on the safety and efficacy of Cohorts 1 to 5, and will not exceed 900 mg/day. Escalation will end with either the MTD cohort or three levels above full BTK occupancy, whichever is observed first. An additional arm of the study will explore 100 mg BID dosing. Treatment with oral Formula (2) may be continued for greater than 28 days until disease progression or an unacceptable drug-related toxicity occurs.

[1608] The inclusion criteria for the study are as follows: (1) men and women ≥18 years of age with a confirmed diagnosis of CLL/SLL, which has relapsed after, or been refractory to, ≥2 previous treatments for CLL/SLL; however, subjects with 17p deletion are eligible if they have relapsed after, or been refractory to, 1 prior treatment for CLL/SLL; (2) body weight ≥60 kg, (3) ECOG performance status of ≤2; (4) agreement to use contraception during the study and for 30 days after the last dose of study drug if sexually active and able to bear children; (5) willing and able to participate in all required evaluations and procedures in this study protocol including swallowing capsules without difficulty; or (6) ability to understand the purpose and risks of the study and provide signed and dated informed consent and authorization to use protected health information (in accordance with national and local subject privacy regulations).

[1609] The dosage form and strength of Formula (2) used in the clinical study is a hard gelatin capsules prepared using standard pharmaceutical grade excipients (microcrystalline cellulose) and containing 25 mg of Formula (2) each. The color of the capsules is Swedish orange. The route of administration is oral (per os, or PO). The dose regimen is once daily or twice daily, as defined by the cohort, on an empty stomach (defined as no food 2 hours before and 30 minutes after dosing).

[1610] The baseline characteristics for the patients enrolled in the clinical study are given in Table 21.

TABLE 21
Relapsed/refractory CLL baseline characteristics.

| Characteristic | CLL (N = 44) |
|---|---|
| Patient Demographics | |
| Age (years), median (range) | 62 (45-84) |
| Sex, men (%) | 33 (75) |
| Prior therapies, median | 3 (1-10) |
| (range), n | |
| ≥3 prior therapies, n (%) | 26 (59) |
| Clinical Details | |
| ECOG performance status ≥ 1 | 28 (63) |
| (%) | |
| Rai stage III/IV | 16 (36) |
| Bulky diseasen ≥ 5 cm, n (%) | 15 (34) |
| Cytopenia at baseline | 33 (75) |
| Cytogenic Status | |
| Chromosome 11q22.3 deletion | 18 (41) |
| (Del 11q), n (%) | |
| Chromosome 17p13.1 (Del | 19 (34) |
| 17p), n (%) | |
| IgV_{H} status (unmutated), n (%) | 28 (64) |

[1611] The results of the clinical study in relapsed/refractory CLL patients are summarized in Table 22.

TABLE 22
Activity of Formula (2) in relapsed/refractory CLL.

| | All | 100 mg | 175 mg | 250 mg | 100 mg | 400 mg |
|---|---|---|---|---|---|---|
| | Cohorts | QD | QD | QD | BID | QD |
| n (%) | (N = 31) | (N = 8) | (N = 8) | (N = 7) | (N = 3) | (N = 5) |
| PR | 22 (71) | 7 (88) | 5 (63) | 5 (71) | 3 (100) | 2 (40) |
| PR + L | 7 (23) | 0 (0) | 3 (37) | 2 (29) | 0 (0) | 2 (40) |
| SD | 2 (6) | 1 (12) | 0 (0) | 0 (0) | 0 (0) | 1 (20) |
| PD | 0 (0) | 0 (0) | 0 (0) | 0 (0) | 0 (0) | 0 (0) |

Median (range) Cycles

| | | | | | |
|---|---|---|---|---|---|
| 7.3 | 10.0 | 8.6 | 7.0 | 5.2 | 5.0 |
| (3.0-10.8) | (9.0-10.8) | (3.0-8.8) | (7.0-7.3) | (4.7-5.5) | (4.8-5.5) |

(PR = partial response; PR + L = partial response with lymphocytosis; SD = stable disease; PD = progressive disease.)

[1612] FIG. 40 shows the median % change in ALC and SPD from baseline in the clinical study of Formula (2), plotted in comparison to the results reported for ibrutinib in FIG. 1A of Byrd, et al., N. Engl. J. Med. 2013, 369, 32-42. The results show that Formula (2) leads to a more rapid patient response in CLL than corresponding treatment with ibrutinib. This effect is illustrated, for example, by the median % change in SPD, which achieved the same status in the present study at 7 months of treatment with Formula (2) as compared to 18 months for ibrutinib. The % change in SPD observed in the different cohorts (i.e. by dose and dosing regimen) is shown in FIG. 41, and in all cases shows significant responses.

[1613] A Kaplan-Meier curve showing PFS from the clinical CLL study of Formula (2) is shown in FIG. 42. A comparison of survival curves was performed using the Log-Rank (Mantle-Cox) test, with a p-value of 0.0206 indicating that the survival curves are different. The number of patients at risk is shown in FIG. 43. Both FIG. 42 and FIG. 43 show the results for Formula (2) in comparison to the results reported for Formula (10) (ibrutinib) in Byrd, et al., N. Engl. J. Med. 2013, 369, 32-42. An improvement in survival and a reduction in risk are observed in CLL patients treated with Formula (2) in comparison to patients treated with ibrutinib.

[1614] Based on the data and comparisons shown above, the CLL study showed that the efficacy of Formula (2) was surprisingly superior to that of Formula (10) (ibrutinib).

[1615] In the literature study of ibrutinib, increased disease progression was associated with patients with high-risk cytogenetic lesions (17p13.1 deletion or 11q22.3 deletion), as shown in FIG. 3A in Byrd, et al., N. Engl. J. Med. 2013, 369, 32-42, which shows ibrutinib PFS including PFS broken down by genetic abnormality. The 17p and 11q deletions are validated high-risk characteristics of CLL, and the 17p deletion is the highest risk. In FIG. 44, the PFS is shown for Formula (2) in patients with the 17p deletion in comparison to the results obtained for ibrutinib in Byrd, et al., N. Engl. J. Med. 2013, 369, 32-42. A p-value of 0.0696 was obtained. In FIG. 45, the number of patients at risk with the 17p deletion is compared. To date, no 17p patients have progressed on Formula (2).

[1616] The adverse events observed in the clinical study in relapsed/refractory CLL are given in Table 23. No DLTs were observed. The MTD was not reached. No treatment-related serious adverse events (SAEs) were observed. No prophylactic antivirals or antibiotics were needed.

TABLE 23
Treatment-related adverse events reported in the clinical study of Formula
(2) in relapsed/refractory CLL. (Reported in ≥5% of patients.)

| Adverse Events | | |
|---|---|---|
| (Treatment- | | |
| Related), n (%) | Grade | All (N = 44) |
| Headache | ½ | 7 (16) |
| Increased tendency | 1 | 6 (14) |
| to bruise | | |
| Diarrhea | 1 | 4 (9) |
| Petechiae | 1 | 3 (7) |

[1617] The clinical study of Formula (2) thus showed other unexpectedly superior results compared to ibrutinib therapy. A lack of lymphocytosis was observed in the study. Furthermore, only grade 1 AEs were observed, and these AEs were attributable to the high BTK selectivity of Formula (2).

[1618] BTK target occupancy was measured for relapsed/refractory CLL patients with the results shown in FIG. 46. For 200 mg QD dosing of the BTK inhibitor of Formula (2), about 94%-99% BTK occupancy was observed, with superior 24 hour coverage and less inter-patient variability also observed. For 420 mg and 840 mg QD of the BTK inhibitor ibrutinib, 80%-90% BTK occupancy was observed, with more inter-patient variability and capped occupancy. These results indicate that the BTK inhibitor of Formula (2) achieves superior BTK occupancy in CLL patients than ibrutinib.

[1619] The effects of Formula (2) on cell subset percentages were also evaluated using flow cytometry analysis of peripheral blood, with the results shown in FIG. 47, FIG. 48, FIG. 49, FIG. 50, FIG. 51, and FIG. 52. PBMC samples from CLL patient samples drawn prior to (predose) and after 28 days of dosing with Formula (2) were compared for potential changes in cell subsets. PBMCs were stained with monoclonal antibodies conjugated to fluorescent tags (flourochromes) to identify cell subsets via flow cytometry. Non-viable cells were excluded from the analysis using the dye 7-aminoactinomycin D (7-AAD). To produce the metric of percent change, the following steps were taken. First, each cell subset was defined by hierarchical flow cytometry gating. Then, the change in frequency (between day 1 and day 28) was calculated for each cell subset. MDSC subsets were measured as a % of all myeloid cells. T cell subsets were measured as a % of all CD3⁺ cells, and NK cells were measured as a % of all live CD45⁺ cells. In FIG. 47 and FIG. 48, the results show the % change in MDSC (monocytic) level over 28 days versus % ALC change at cycle 1 day 28 (C1D28) and at cycle 2 day 28 (C2D28). A cycle is 28 days. A trend is observed wherein patients with decreasing ALC % had increasing MDSC (monocytic) %. This may include patients who had quickly resolving lymphocytosis and those with no initial lymphocytosis. This provides evidence that treatment with Formula (2) mobilizes MDSCs and thus affects the CLL tumor microenvironment in marrow and lymph nodes, which is an unexpected indication of superior efficacy. In FIG. 49 and FIG. 50, the results show the % change in NK cell level over 28 days versus % ALC change, measured at C1D28 or C2D28, and similar trends are observed wherein patients with decreasing ALC % had increasing NK cell %. This may include patients who had quickly resolving lymphocytosis and those having no initial lymphocytosis. The effects in FIG. 47 to FIG. 50 are observed in multiple cohorts, at doses including 100 mg BID, 200 mg QD, and 400 mg QD. In FIG. 51 and FIG. 52, the effects on NK cells and MDSC cells are compared to a number of other markers versus % change in ALC at C1D28 and C2D28. These other markers include CD4+ T cells, CD8+ T cells, CD4+/CD8+ T cell ratio, NK-T cells, PD-1+CD4+ T cells, and PD-1+CD8+ T cells. The effects on NK cells and MDSC cells are observed to be much more pronounced than on any of these other markers.

[1620] These results suggest that after Formula (2) administration, the CLL microenvironment undergoes a change wherein NK cells and monocytic MDSC subsets increase in frequency in the peripheral blood in patients with falling ALC counts, an important clinical parameter in CLL. The NK cell increase may reflect an overall increase in cytolytic activity against B-CLL resulting in the ALC % to drop. The increase in MDSC % in the blood may be due to a movement of these cells out of the lymph nodes, spleen, and bone marrow, which are all possible sites of CLL proliferation. Fewer MDSCs at the CLL proliferation centers would likely result in a reduced immunosuppressive microenvironment leading to an increase in cell-mediated immunity against the tumor, decreased tumor proliferation, and eventually lower ALC % in the circulation.

[1621] Updated clinical results from the CLL study are shown in FIG. 53 to FIG. 58. FIG. 53 shows an update of the data presented in FIG. 40. FIG. 54 shows an update of the data presented in FIG. 46, and includes BID dosing results. Formula (2) 200 mg QD dosing resulted in 94%-99% BTK occupancy, 24 hour coverage, and less inter-patient variability. Ibrutinib 420 mg and 840 mg QD dosing resulted in 80%-90% BTK occupancy, more inter-patient variability, and capped occupancy. Formula (2) 100 mg BID dosing resulted in 97%-99% BTK occupancy, complete BTK coverage, and less inter-patient variability. The PFS for patients with 11q deletions and 17p deletions are illustrated in FIG. 55, FIG. 56, and FIG. 57. Updated SPD results are illustrated in FIG. 58, and again show significant results across all cohorts and dosing regimens.

[1622] Treatment of CLL patients with Formula (2) also resulted in increased apoptosis, as illustrated in FIG. 59. Apoptotic B-CLL was defined by flow cytometry as having cleaved PARP⁺, Caspase 3⁺, CD19⁺, and CD5⁺ phenotypes. 82% of samples tested had a baseline change greater than 25%. Treatment of CLL patients also showed that Formula (2) decreased plasma chemokines associated with MDSC homing and retention. A significant decrease in CXCL12 and CCL2 levels has been observed in patients treated with Formula (2), as shown in FIG. 60 and FIG. 61, respectively.

### Example 12—Effects of BTK Inhibitors on Thrombosis

[1623] Clinical studies have shown that targeting the BCR signaling pathway by inhibiting BTK produces significant clinical benefit (Byrd, et al., N. Engl. J. Med. 2013, 369(1), 32-42, Wang, et al., N. Engl. J. Med. 2013, 369(6), 507-16). However, in these studies, bleeding has been reported in up to 50% of ibrutinib-treated patients. Most bleeding events were of grade 1-2 (spontaneous bruising or petechiae) but, in 5% of patients, they were of grade 3 or higher after trauma. These results are reflected in the prescribing information for ibrutinib, where bleeding events of any grade, including bruising and petechiae, were reported in about half of patients treated with ibrutinib (IMBRUVICA package insert and prescribing information, revised July 2014, U.S. Food and Drug Administration).

[1624] Constitutive or aberrant activation of the BCR signaling cascade has been implicated in the propagation and maintenance of a variety of B cell malignancies. Small molecule inhibitors of BTK, a protein early in this cascade and specifically expressed in B cells, have emerged as a new class of targeted agents. There are several BTK inhibitors, including Formula (17) (CC-292), and Formula (10) (ibrutinib), in clinical development. Importantly, early stage clinical trials have found ibrutinib to be particularly active in chronic lymphocytic leukemia (CLL) and mantle cell lymphoma (MCL), suggesting that this class of inhibitors may play a significant role in various types of cancers (Aalipour and Advani, Br. J. Haematol. 2013, 163, 436-43). However, their effects are not limited to leukemia or lymphomas as platelets also rely on the Tec kinases family members BTK and Tec for signal transduction in response to various thrombogenic stimuli (Oda, et al., Blood 2000, 95(5), 1663-70; Atkinson, et al., Blood 2003, 102(10), 3592-99). In fact, both Tec and BTK play an important role in the regulation of phospholipase Cγ2 (PLCγ2) downstream of the collagen receptor glycoprotein VI (GPVI) in human platelets. In addition, BTK is activated and undergoes tyrosine phosphorylation upon challenge of the platelet thrombin receptor, which requires the engagement of aIIbβ3 integrin and PI3K activity (Laffargue, et al., FEBS Lett. 1999, 443(1), 66-70). It has also been implicated in GPIbα-dependent thrombus stability at sites of vascular injury (Liu, et al., Blood 2006, 108(8), 2596-603). Thus, BTK and Tec are involved in several processes important in supporting the formation of a stable hemostatic plug, which is critical for preventing significant blood loss in response to vascular injury. Hence, the effects of the BTK inhibitors of Formula (2) and Formula (10) (ibrutinib) were evaluated on human platelet-mediated thrombosis by utilizing the in vivo human thrombus formation in the VWF HA1 mice model described in Chen, et al., Nat. Biotechnol. 2008, 26(1), 114-19.

[1625] Administration of anesthesia, insertion of venous and arterial catheters, fluorescent labeling and administration of human platelets (5×10⁸/ml), and surgical preparation of the cremaster muscle in mice have been previously described (Chen et al., Nat Biotechnol. 2008, 26(1), 114-19). Injury to the vessel wall of arterioles (˜40-65 mm diameter) was performed using a pulsed nitrogen dye laser (440 nm, Photonic Instruments) applied through a 20× water-immersion Olympus objective (LUMPlanF1, 0.5 numerical aperture (NA)) of a Zeiss Axiotech vario microscope. Human platelet and wall interactions were visualized by fluorescence microscopy using a system equipped with a Yokogawa CSU-22 spinning disk confocal scanner, iXON EM camera, and 488 nm and 561 nm laser lines to detect BCECF-labeled and rhodamine-labeled platelets, respectively (Revolution XD, Andor Technology). The extent of thrombus formation was assessed for 2 minutes after injury and the area (μm²) of coverage determined (Image IQ, Andor Technology). For the Formula (2), Formula (17) (CC-292), and Formula (10) (ibrutinib) inhibition studies, the BTK inhibitors were added to purified human platelets for 30 minutes before administration.

[1626] The in vivo throbus effects of the BTK inhibitors, Formula (2), Formula (17) (CC-292), and Formula (10) (ibrutinib), were evaluated on human platelet-mediated thrombosis by utilizing the in vivo human thrombus formation in the VWF HA1 mice model, which has been previously described (Chen, et al., Nat Biotechnol. 2008, 26(1), 114-19). Purified human platelets were preincubated with various concentrations of the BTK inhibitors (0.1 μM, 0.5 μM, or 1 μM) or DMSO and then administered to VWF HA1 mice, followed by laser-induced thrombus formation. The BTK inhibitor-treated human platelets were fluorescently labeled and infused continuously through a catheter inserted into the femoral artery. Their behavior in response to laser-induced vascular injury was monitored in real time using two-channel confocal intravital microscopy (Furie and Furie, J. Clin. Invest. 2005, 115(12), 2255-62). Upon induction of arteriole injury untreated platelets rapidly formed thrombi with an average thrombus size of 6,450±292 mm² (mean±s.e.m.), as shown in FIG. 62, FIG. 63, and FIG. 64. Similarly, Formula (2) (1 μM) treated platelets formed a slightly smaller but not significantly different thrombi with an average thrombus size of 5733±393 mm² (mean±s.e.m.). In contrast, a dramatic reduction in thrombus size occurred in platelets pretreated with 1 μM of Formula (10) (ibrutinib), 2600±246 mm² (mean±s.e.m.), resulting in a reduction in maximal thrombus size by about 61% compared with control (P>0.001) (FIG. 62 and FIG. 64). Similar results were obtained with platelets pretreated with 500 nM of Formula (2) or ibrutinib: thrombus size of 5946±283 mm², and 2710±325 mm² respectively. These initial results may provide some mechanic background and explanation on the reported 44% bleeding related adverse event rates in the Phase III RESONATE study comparing ibrutinib with ofatumumab. The results obtained for Formula (17) (CC-292) were similar to that for Formula (10) (ibrutinib), as shown in FIGS. 62, 68, and 69. The effect of the BTK inhibitor concentration is shown in FIG. 65. These results demonstrate the surprising advantage of the BTK inhibitor of Formula (2), which does not interfere with thrombus formation, while the BTK inhibitors of Formula (17) (CC-292) and Formula (10) (ibrutinib) interfere with thrombus formation.

[1627] The objective of this study was to evaluate in vivo thrombus formation in the presence of BTK inhibitors. In vivo testing of novel antiplatelet agents requires informative biomarkers. By utilizing a genetic modified mouse von Willebrand factor (VWFR1326H) model that supports human but not mouse platelet-mediated thrombosis, we evaluated the effects of Formula (2), Formula (17) (CC-292), and Formula (10) (ibrutinib) on thrombus formation. These results show that Formula (2) had no significant effect on human platelet-mediated thrombus formation while Formula (10) (ibrutinib) was able to limit this process, resulting in a reduction in maximal thrombus size by 61% compared with control. Formula (17) (CC-292) showed an effect similar to Formula (10) (ibrutinib). These results, which show reduced thrombus formation for ibrutinib at physiologically relevant concentrations, may provide some mechanistic background for the Grade ≥3 bleeding events (e.g., subdural hematoma, gastrointestinal bleeding, hematuria and postprocedural hemorrhage) that have been reported in ≤6% of patients treated with Formula (10) (ibrutinib).

[1628] GPVI platelet aggregation was measured for Formula (2) and Formula (10) (ibrutinib). Blood was obtained from untreated humans, and platelets were purified from plasma-rich protein by centrifugation. Cells were resuspended to a final concentration of 350,000/μL in buffer containing 145 mmol/L NaCl, 10 mmol/L HEPES, 0.5 mmol/L Na₂HPO₄, 5 mmol/L KCl, 2 mmol/L MgCl₂, 1 mmol/L CaCl₂, and 0.1% glucose, at pH 7.4. Stock solutions of Convulxin (CVX) GPVI were prepared on the day of experimentation and added to platelet suspensions 5 minutes (37° C., 1200 rpm) before the induction of aggregation. Aggregation was assessed with a Chronolog Lumi-Aggregometer (model 540 VS; Chronolog, Havertown, Pa.) and permitted to proceed for 6 minutes after the addition of agonist. The results are reported as maximum percent change in light transmittance from baseline with platelet buffer used as a reference. The results are shown in FIG. 66.

[1629] In FIG. 67, the results of CVX-induced (250 ng/mL) human platelet aggregation results before and 15 minutes after administration of the BTK inhibitors to 6 healthy individuals are shown.

[1630] The results depicted in FIG. 66 and FIG. 67 indicate that the BTK inhibitor of Formula (10) (ibrutinib) significantly inhibits GPVI platelet aggregation, while the BTK inhibitor of Formula (2) does not, further illustrating the surprising benefits of the latter compound.

### Example 11—Synergistic Combinations of BTK Inhibitors and GITR Binding Molecules

[1631] Synergistic combinations of BTK inhibitors and GITR binding molecules can be studied using the disease models described above, including the ID8 syngeneic orthotopic ovarian cancer model and the KrasLA2 genetic tumor NSCLC model. For example, the BTK inhibitor of Formula (2) and a murine GITR binding molecule may be studied in this manner. Synergistic effects of the combination of a BTK inhibitor with a GITR binding molecule may be observed in comparison to monotherapy.

[1632] A TCL1 transgenic murine model may also be used to observe synergy in a model relevant to B cell cancers including CLL. Johnson, et al., Blood 2006, 108, 1334-1338. For the TCL1 murine model, cells may be allografted through intravenous injection into SCID mice. Mice are housed under conventional barrier protection and monitored for the development of CLL-like disease by monthly white blood cell (WBC) counts using a Hemavet HV950FS hematology analyzer (Drew Scientific) and flow cytometric analysis. Mice are considered to have developed leukemic disease in the presence of at least 20% monoclonal CD5+ B cells in the peripheral blood and rising lymphocyte counts with respect to previous analyses. Overt leukemia is defined as at least 50% monoclonal CD5+ B cells in the peripheral blood and WBC above normal range (>10.7×10⁶/mL). TCL1 mice may be treated with vehicle, the BTK inhibitor of Formula (2), murine anti-GITR agonist antibody (which are commercially available), or combinations of Formula (2) and murine anti-GITR agonist antibody starting on day 14 after cell injection. The treatment effect on xenografted and murine CLL cells from peripheral blood and spleen is assessed by flow cytometry. Overall survival is also assessed.

### Example 12—Synergistic Combinations of BTK Inhibitors and 4-1BB Agonists in Animal Models

[1633] Synergistic combinations of BTK inhibitors and 4-1BB agonists can be studied using the disease models described above, including the ID8 syngeneic orthotopic ovarian cancer model and the KrasLA2 genetic tumor NSCLC model. For example, the BTK inhibitor of Formula (2) and a murine 4-1BB agonist may be studied in this manner. Synergistic effects of the combination of a BTK inhibitor with a 4-1BB agonist may be observed in comparison to monotherapy.

[1634] A TCL1 transgenic murine model may also be used to observe synergy in a model relevant to B cell cancers including CLL. Johnson, et al., Blood 2006, 108, 1334-1338. For the TCL1 murine model, cells may be allografted through intravenous injection into SCID mice. Mice are housed under conventional barrier protection and monitored for the development of CLL-like disease by monthly white blood cell (WBC) counts using a Hemavet HV950FS hematology analyzer (Drew Scientific) and flow cytometric analysis. Mice are considered to have developed leukemic disease in the presence of at least 20% monoclonal CD5+ B cells in the peripheral blood and rising lymphocyte counts with respect to previous analyses. Overt leukemia is defined as at least 50% monoclonal CD5+ B cells in the peripheral blood and WBC above normal range (>10.7×10⁶/mL). TCL1 mice may be treated with vehicle, the BTK inhibitor of Formula (2), murine 4-1BB agonist antibody (which are commercially available), or combinations of Formula (2) and murine anti-4-1BB agonist antibody starting on day 14 after cell injection. The treatment effect on xenografted and murine CLL cells from peripheral blood and spleen is assessed by flow cytometry. Overall survival is also assessed.

### Example 13—Synergistic Combinations of BTK Inhibitors and 4-1BB Agonists in the CT26 Colorectal Cancer Model

[1635] The CT26 (colon tumor #26) syngeneic mouse colorectal model was used to investigate the therapeutic efficacy of the combination of the BTK inhibitor of Formula (2) and an anti-4-1BB (anti-CD137) agonistic monoclonal antibody (e.g., BioXcell InVivoMAb LOB12.3 Catalog#: BE0169). A syngeneic mouse colorectal model bears a tumor derived from the species of origin and allows for study of potential treatments in a human surrogate model with a functional immune system. CT cells were developed in 1975 by exposing Balb/c mice to N-nitroso-N-methylurethane, which lead to a rapidly-growing grade IV carcinoma that may be readily implanted and easily metastasizes, as described in Griswold, et al., Cancer 1975, 36, 2441-2444. Further details of the CT26 syngeneic mouse colorectal model may be found in: Castle, et al., BMC Genomics, 2013, 15, 190; Endo, et al., Cancer Gene Therapy, 2002, 9, 142-148; Roth et al., Adv. Immunol. 1994, 57, 281-351; Fearon, et al., Cancer Res. 1988, 48, 2975-2980. CT26 cells share many molecular features with human cells and thus represent a model for aggressive, undifferentiated, refractory human colorectal carcinoma cells.

[1636] The CT-26 tumor cells were maintained in vitro as a monolayer culture in RPMI1640 medium supplemented with 10% fetal bovine serum at 37° C. in an atmosphere of 5% CO₂ in air. The tumor cells are routinely subcultured twice weekly. The cells observed to grow in an exponential growth phase were harvested and used for tumor inoculation.

[1637] All mice were lightly anesthetized with isoflurane before implantation, and then each mouse was inoculated subcutaneously at the right lower flank with CT-26 tumor cells (3×10⁵) in 0.1 mL of PBS for tumor development. The treatments were started when the mean tumor size reached approximately 100 mm³. The test article administration and the animal numbers in each group are shown in the following treatment combination regimen and experiment design: Group (I): Vehicle; Group (II): 100 μg/200 μL intraperitoneal injection (IP) Q4D×4 (4-1BB agonist monoclonal antibody); Group (III): 15 mg/kg peroral BID (Formula (2) BTK inhibitor); and Group (IV): 100 μg/200 μL IP Q4D×4 (4-1BB agonist)+15 mg/kg peroral BID (Formula (2)) (wherein Q4D means every 4 days). The date of grouping is denoted as day 0 of post grouping (PG-D0).

[1638] After inoculation of tumor cells, animals were checked daily for morbidity and mortality. At the time of routine monitoring, animals were checked for any effects of tumor growth and treatments on normal behavior such as mobility, visual estimation of food and water consumption, body weight gain/loss (body weights will be measured twice weekly after randomization), eye/hair matting and any other abnormal effect. Death and observed clinical signs were recorded in the comments of datasheet for each animal in detail.

[1639] Tumor volumes were measured twice weekly in two dimensions using a caliper, and the volume (V) is expressed in mm³ using the formula: V=0.5 a×b² where a and b are the long and short diameters of the tumor, respectively.

[1640] Results of the study are shown in FIG. 68. The combination of Formula (2) and an agonistic 4-1BB monoclonal antibody exhibits a strong synergistic effect on tumor volume in the CT26 model, as shown by the significant reduction in tumor volume relative to both Formula (2) monotherapy and 4-1BB agonist monotherapy, beyond that expected from a combination.

### Example 14—Synergistic Combinations of BTK Inhibitors and OX40 Agonists in the KPC Model and PancO2 Model

[1641] The KPC model described in Example 4, using KPC-derived murine cells that are labeled with luciferase and orthotopically injected into C57/BL6 mice, was used to evaluate synergy between the BTK inhibitor of Formula (2) and the murine OX40 agonistic antibody InVivoMAb anti-mCD134/mOX40 (clone OX86), which was obtained from BioXcell Inc, West Lebanon, N.H. Mice were treated with vehicle, Formula (2) at 15 mg/kg BID, murine OX40 agonistic antibody at 100 μg Q4D, or a combination of Formula (2) at 15 mg/kg BID and murine OX40 agonistic antibody at 100 μg Q4D, as described in FIG. 69. The results shown in FIG. 69 demonstrate the synergistic effect of the combination upon tumor size. An additional mouse group was treated with murine anti-PD-1 antibody as described previously, and compared to the tumor volume results with the OX40 agonistic antibody in FIG. 70. Again, synergistic results are obtained showing significant reductions in tumor volumes with the combination of the BTK inhibitor of Formula (2) and the OX40 agonistic antibody, including in comparison to the combination of the BTK inhibitor and the anti-PD-1 antibody. FIG. 71 illustrates percentage survival, and again the arm of the study combining Formula (2) and the OX40 agonistic antibody shows surprising survival compared to Formula (2) alone and the combination of this BTK inhibitor and the anti-PD-1 antibody.

[1642] The monotherapy and combinations described above were further studied in the PancO2 model (using PancO2 cells orthotopically injected into C57/BL6 mice), as described in Partecke, et al., Eur. Surg. Res. 2011, 47, 98-107. The results are shown in FIG. 72 and FIG. 73, and again indicate that the combination of Formula (2) and the OX40 agonistic antibody is superior to the other treatment arms.

1. A method of treating a hyperproliferative disease, comprising co-administering, to a mammal in need thereof, therapeutically effective amounts of (1) a molecule selected from the group consisting of a glucocorticoid-induced TNF receptor-related (GITR) binding molecule, a 4-1BB agonist, an OX40 agonist, combinations thereof, and fragments, derivatives, conjugates, variants, and biosimilars thereof, and (2) a Bruton's tyrosine kinase (BTK) inhibitor or a pharmaceutically acceptable salt, solvate, hydrate, cocrystal, or prodrug thereof, wherein the BTK inhibitor is selected from the group consisting of: [chemical structure] [chemical structure]
and pharmaceutically-acceptable salts thereof.

2. The method of claim 1, wherein the molecule selected from the group consisting of a GITR binding molecule, a 4-IBB agonist, an OX40 agonist, and combinations thereof is administered to the mammal before administration of the BTK inhibitor.

3. The method of claim 1, wherein the molecule selected from the group consisting of a GITR binding molecule, a 4-1BB agonist, an OX40 agonist, and combinations thereof is administered to the mammal simultaneously with the administration of the BTK inhibitor.

4. The method of claim 1, wherein the molecule selected from the group consisting of a GITR binding molecule, a 4-1BB agonist, an OX40 agonist, and combinations thereof is administered to the mammal after administration of the BTK inhibitor.

5. (canceled)

6. The method of claim 1, wherein the BTK inhibitor is selected from the group consisting of: [chemical structure]
and pharmaceutically-acceptable salts.

7. The method of claim 1, wherein the GITR binding molecule is selected from the group consisting of TRX518, 6C8, 36E5, 3D6, 61G6, 6H6, 61F6, 1D8, 17FI0, 35D8, 49AI, 9E5, 31H6, 1D7, 33C9, 33F6, 34G4, 35BI0, 41EII, 41G5, 42AII, 44CI, 45A8, 46EII, 48HI2, 48H7, 49D9, 49E2, 48A9, 5H7, 7AI0, 9H6, and fragments, derivatives, conjugates, variants, biosimilars, and combinations thereof.

8. The method of claim 1, wherein the 4-IBB agonist is selected from the group consisting of PF-05082566 (Pfizer), IDS, 3Elor, 4B4 (BioLegend 309809), H4-1BB-MI27 (BD Pharmingen 552532), BBK2 (Thermo Fisher MS62IPABX), 145501 (Leinco Technologies B59I), antibody produced by cell line deposited as ATCC No. HB-11248, 5F4 (BioLegend 31 1503), C65-485 (BD Pharmingen 559446), 20H4.9-IgG4 (I0C7 or BMS-663513 (urelumab)), 20H4.9-gGI (BMS-663031), 4E9, BMS-554271, BMS-469492, 3H3, BMS-469497, 3EI, 53A2, and 3B8, and fragments, derivatives, conjugates, variants, biosimilars, and combinations thereof.

9. The method of claim 1, wherein the OX40 agonist is selected from the group consisting of MEDI6469 (MedImmune), MEDI0562 (MedImmune), MEDI6383 (MedImmune), MOXR0916 (Genentech), GSK3I 74998, and fragments, derivatives, conjugates, variants, biosimilars, and combinations thereof.

10. The method of claim 1, further comprising the step of administering a therapeutically effective amount of an anti-CD20 antibody selected from the group consisting of rituximab, obinutuzumab, ofatumumab, veltuzumab, tositumomab, ibritumomab, and fragments, derivatives, conjugates, variants, radioisotope-labeled complexes, biosimilars, and combinations thereof.

11. (canceled)

12. The method of claim 1, further comprising the step of administering a therapeutically effective amount of a chemotherapeutic regimen selected from the group consisting of (1) fludarabine, cyclophosphamide, and rituximab (FCR); and (2) rituximab, cyclophosphamide, doxorubicin, vincristine, and prednisone (R-CHOP).

13. The method of claim 1, further comprising the step of administering a therapeutically effective amount of a PD-I or PD-LI inhibitor selected from the group consisting of nivolumab, pembrolizumab, pidilizumab, durvalumab, atezolizumab, avelumab, and antigen-binding fragments, variants, conjugates, or biosimilars thereof.

14. The method of claim 1, wherein the hyperproliferative disease is a cancer.

15. The method of claim 14, wherein the cancer is a B cell hematological malignancy.

16. The method of claim 15, wherein the B cell hematological malignancy selected from the group consisting of chronic lymphocytic leukemia (CLL), small lymphocytic leukemia (SLL), non-Hodgkin's lymphoma (NHL), diffuse large B cell lymphoma (DLBCL), follicular lymphoma (FL), mantle cell lymphoma (MCL), Hodgkin's lymphoma, B cell acute lymphoblastic leukemia (B-ALL), Burkitt's lymphoma, Waldenstrom's macroglobulinemia (WM), Burkitt's lymphoma, multiple myeloma, and myelofibrosis.

17. The method of claim 14, wherein the cancer is a solid tumor cancer.

18. The method of claim 17, wherein the solid tumor cancer is selected from the group consisting of bladder cancer, non-small cell lung cancer, cervical cancer, anal cancer, pancreatic cancer, squamous cell carcinoma including head and neck cancer, renal cell carcinoma, melanoma, ovarian cancer, small cell lung cancer, glioblastoma, gastrointestinal stromal tumor, breast cancer, lung cancer, colorectal cancer, thyroid cancer, bone sarcoma, stomach cancer, oral cavity cancer, oropharyngeal cancer, gastric cancer, kidney cancer, liver cancer, prostate cancer, esophageal cancer, testicular cancer, gynecological cancer, colon cancer, and brain cancer.

19. The method of claim 16, further comprising a step of administering a therapeutically effective amount of albumin-bound paclitaxel.

20. A composition comprising therapeutically effective amounts of (1) a molecule selected from the group consisting of a GITR binding molecule, a 4-IBB agonist, an OX40 agonist, combinations thereof, and fragments, derivatives, conjugates, variants, and biosimilars thereof; and (2) a Bruton's tyrosine kinase (BTK) inhibitor or a pharmaceutically acceptable salt, solvate, hydrate, cocrystal, or prodrug thereof.

21-41. (canceled)

The application's sequence listing, which the Patent Office published only in electronic form, follows.

SEQUENCE LISTING (633 sequences)

SEQ ID NO: 1 - protein, 241 aa, Homo sapiens
MAQHGAMGAFRALCGLALLCALSLGQRPTGGPGCGPGRLLLGTGTDARCCRVHTTRCCRDYPGEECCSEWDCMCVQPEFHCGDPCCTTCRHHPCPPGQGVQSQGKFSFGFQCIDCASGTFSGGHEGHCKPWTDCTQFGFLTVFPGNKTHNAVCVPGSPPAEPLGWLTVVLLAVAACVLLLTSAQLGLHIWQLRSQCMWPRETQLLLEVPPSTEDARSCQFPEEERGERSAEEKGRLGDLWV

SEQ ID NO: 2 - protein, 228 aa, Mus musculus
MGAWAMLYGVSMLCVLDLGQPSVVEEPGCGPGKVQNGSGNNTRCCSLYAPGKEDCPKERCICVTPEYHCGDPQCKICKHYPCQPGQRVESQGDIVFGFRCVACAMGTFSAGRDGHCRLWTNCSQFGFLTMFPGNKTHNAVCIPEPLPTEQYGHLTVIFLVMAACIFFLTTVQLGLHIWQLRRQHMCPRETQPFAEVQLSAEDACSFQFPEEERGEQTEEKCHLGGRWP

SEQ ID NO: 3 - protein, 449 aa, Artificial Sequence
  humanized 6C8 heavy chain variant
QVTLRESGPALVKPTQTLTLTCTFSGFSLSTSGMGVGWIRQPPGKALEWLAHIWWDDDKYYNPSLKSRLTISKDTSKNQVVLTMTNMDPVDTATYYCARTRRYFPFAYWGQGTLVTVSSASTKGPSVFPLAPSSKSTSGGTAALGCLVKDYFPEPVTVSWNSGALTSGVHTFPAVLQSSGLYSLSSVVTVPSSSLGTQTYICNVNHKPSNTKVDKKVEPKSCDKTHTCPPCPAPELLGGPSVFLFPPKPKDTLMISRTPEVTCVVVDVSHEDPEVKFNWYVDGVEVHNAKTKPREEQYNSTYRVVSVLTVLHQDWLNGKEYKCKVSNKALPAPIEKTISKAKGQPREPQVYTLPPSRDELTKNQVSLTCLVKGFYPSDIAVEWESNGQPENNYKTTPPVLDSDGSFFLYSKLTVDKSRWQQGNVFSCSVMHEALHNHYTQKSLSLSPGK

SEQ ID NO: 4 - protein, 449 aa, Artificial Sequence
  humanized 6C8 heavy chain variant
QVTLRESGPALVKPTQTLTLTCTFSGFSLSTSGMGVGWIRQPPGKALEWLAHIWWDDDKYYNPSLKSRLTISKDTSKNQVVLTMTNMDPVDTATYYCARTRRYFPFAYWGQGTLVTVSSASTKGPSVFPLAPSSKSTSGGTAALGCLVKDYFPEPVTVSWNSGALTSGVHTFPAVLQSSGLYSLSSVVTVPSSSLGTQTYICNVNHKPSNTKVDKKVEPKSCDKTHTCPPCPAPELLGGPSVFLFPPKPKDTLMISRTPEVTCVVVDVSHEDPEVKFNWYVDGVEVHNAKTKPREEQYASTYRVVSVLTVLHQDWLNGKEYKCKVSNKALPAPIEKTISKAKGQPREPQVYTLPPSRDELTKNQVSLTCLVKGFYPSDIAVEWESNGQPENNYKTTPPVLDSDGSFFLYSKLTVDKSRWQQGNVFSCSVMHEALHNHYTQKSLSLSPGK

SEQ ID NO: 5 - protein, 449 aa, Artificial Sequence
  humanized 6C8 heavy chain variant
QVTLRESGPALVKPTQTLTLTCTFSGFSLSTSGMGVGWIRQPPGKALEWLAHIWWDDDKYYQPSLKSRLTISKDTSKNQVVLTMTNMDPVDTATYYCARTRRYFPFAYWGQGTLVTVSSASTKGPSVFPLAPSSKSTSGGTAALGCLVKDYFPEPVTVSWNSGALTSGVHTFPAVLQSSGLYSLSSVVTVPSSSLGTQTYICNVNHKPSNTKVDKKVEPKSCDKTHTCPPCPAPELLGGPSVFLFPPKPKDTLMISRTPEVTCVVVDVSHEDPEVKFNWYVDGVEVHNAKTKPREEQYNSTYRVVSVLTVLHQDWLNGKEYKCKVSNKALPAPIEKTISKAKGQPREPQVYTLPPSRDELTKNQVSLTCLVKGFYPSDIAVEWESNGQPENNYKTTPPVLDSDGSFFLYSKLTVDKSRWQQGNVFSCSVMHEALHNHYTQKSLSLSPGK

SEQ ID NO: 6 - protein, 449 aa, Artificial Sequence
  humanized 6C8 heavy chain variant
QVTLRESGPALVKPTQTLTLTCTFSGFSLSTSGMGVGWIRQPPGKALEWLAHIWWDDDKYYQPSLKSRLTISKDTSKNQVVLTMTNMDPVDTATYYCARTRRYFPFAYWGQGTLVTVSSASTKGPSVFPLAPSSKSTSGGTAALGCLVKDYFPEPVTVSWNSGALTSGVHTFPAVLQSSGLYSLSSVVTVPSSSLGTQTYICNVNHKPSNTKVDKKVEPKSCDKTHTCPPCPAPELLGGPSVFLFPPKPKDTLMISRTPEVTCVVVDVSHEDPEVKFNWYVDGVEVHNAKTKPREEQYASTYRVVSVLTVLHQDWLNGKEYKCKVSNKALPAPIEKTISKAKGQPREPQVYTLPPSRDELTKNQVSLTCLVKGFYPSDIAVEWESNGQPENNYKTTPPVLDSDGSFFLYSKLTVDKSRWQQGNVFSCSVMHEALHNHYTQKSLSLSPGK

SEQ ID NO: 7 - protein, 214 aa, Artificial Sequence
  humanized 6C8 light chain
EIVMTQSPATLSVSPGERATLSCKASQNVGTNVAWYQQKPGQAPRLLIYSASYRYSGIPARFSGSGSGTEFTLTISSLQSEDFAVYYCQQYNTDPLTFGGGTKVEIKRTVAAPSVFIFPPSDEQLKSGTASVVCLLNNFYPREAKVQWKVDNALQSGNSQESVTEQDSKDSTYSLSSTLTLSKADYEKHKVYACEVTHQGLSSPVTKSFNRGEC

SEQ ID NO: 8 - protein, 19 aa, Artificial Sequence
  6C8 heavy chain leader
MDRLTFSFLLLIVPAYVLS

SEQ ID NO: 9 - protein, 20 aa, Artificial Sequence
  6C8 light chain leader
METQSQVFVYMLLWLSGVDG

SEQ ID NO: 10 - protein, 138 aa, Artificial Sequence
  humanized 6C8 heavy chain variable region variant
MDRLTFSFLLLIVPAYVLSQVTLKESGPGILKPSQTLSLTCSFSGFSLSTSGMGVGWIRQPSGKGLEWLAHIWWDDDKYYNPSLKSQLTISKDTSRNQVFLKITSVDTADAATYYCARTRRYFPFAYWGQGTLVTVSS

SEQ ID NO: 11 - protein, 138 aa, Artificial Sequence
  humanized 6C8 heavy chain variable region variant
MDRLTFSFLLLIVPAYVLSQVTLKESGPGILKPSQTLSLTCSFSGFSLSTSGMGVGWIRQPSGKGLEWLAHIWWDDDKYYQPSLKSQLTISKDTSRNQVFLKITSVDTADAATYYCARTRRYFPFAYWGQGTLVTVSS

SEQ ID NO: 12 - protein, 127 aa, Artificial Sequence
  humanized 6C8 light chain variable region
METQSQVFVYMLLWLSGVDGDIVMTQSQKFMSTSVGDRVSVTCKASQNVGTNVAWYQQKPGQSPKALIYSASYRYSGVPDRFTGSGSGTDFTLTINNVHSEDLAEYFCQQYNTDPLTFGAGTKLEIK

SEQ ID NO: 13 - protein, 12 aa, Artificial Sequence
  6C8 heavy chain CDR1
GFSLSTSGMGVG

SEQ ID NO: 14 - protein, 16 aa, Artificial Sequence
  6C8 heavy chain CDR2 variant
HIWWDDDKYYNPSLKS

SEQ ID NO: 15 - protein, 16 aa, Artificial Sequence
  6C8 heavy chain CDR2 variant
HIWWDDDKYYQPSLKS

SEQ ID NO: 16 - protein, 9 aa, Artificial Sequence
  6C8 heavy chain CDR3
TRRYFPFAY

SEQ ID NO: 17 - protein, 11 aa, Artificial Sequence
  6C8 light chain CDR1
KASQNVGTNVA

SEQ ID NO: 18 - protein, 7 aa, Artificial Sequence
  6C8 light chain CDR2
SASYRYS

SEQ ID NO: 19 - protein, 9 aa, Artificial Sequence
  6C8 light chain CDR3
QQYNTDPLT

SEQ ID NO: 20 - protein, 449 aa, Artificial Sequence
  chimeric 6C8 heavy chain variant
QVTLKESGPGILKPSQTLSLTCSFSGFSLSTSGMGVGWIRQPSGKGLEWLAHIWWDDDKYYNPSLKSQLTISKDTSRNQVFLKITSVDTADAATYYCARTRRYFPFAYWGQGTLVTVSSASTKGPSVFPLAPSSKSTSGGTAALGCLVKDYFPEPVTVSWNSGALTSGVHTFPAVLQSSGLYSLSSVVTVPSSSLGTQTYICNVNHKPSNTKVDKKVEPKSCDKTHTCPPCPAPELLGGPSVFLFPPKPKDTLMISRTPEVTCVVVDVSHEDPEVKFNWYVDGVEVHNAKTKPREEQYNSTYRVVSVLTVLHQDWLNGKEYKCKVSNKALPAPIEKTISKAKGQPREPQVYTLPPSRDELTKNQVSLTCLVKGFYPSDIAVEWESNGQPENNYKTTPPVLDSDGSFFLYSKLTVDKSRWQQGNVFSCSVMHEALHNHYTQKSLSLSPGK

SEQ ID NO: 21 - protein, 449 aa, Artificial Sequence
  chimeric 6C8 heavy chain variant
QVTLKESGPGILKPSQTLSLTCSFSGFSLSTSGMGVGWIRQPSGKGLEWLAHIWWDDDKYYNPSLKSQLTISKDTSRNQVFLKITSVDTADAATYYCARTRRYFPFAYWGQGTLVTVSSASTKGPSVFPLAPSSKSTSGGTAALGCLVKDYFPEPVTVSWNSGALTSGVHTFPAVLQSSGLYSLSSVVTVPSSSLGTQTYICNVNHKPSNTKVDKKVEPKSCDKTHTCPPCPAPELLGGPSVFLFPPKPKDTLMISRTPEVTCVVVDVSHEDPEVKFNWYVDGVEVHNAKTKPREEQYASTYRVVSVLTVLHQDWLNGKEYKCKVSNKALPAPIEKTISKAKGQPREPQVYTLPPSRDELTKNQVSLTCLVKGFYPSDIAVEWESNGQPENNYKTTPPVLDSDGSFFLYSKLTVDKSRWQQGNVFSCSVMHEALHNHYTQKSLSLSPGK

SEQ ID NO: 22 - protein, 214 aa, Artificial Sequence
  chimeric 6C8 light chain variant
DIVMTQSQKFMSTSVGDRVSVTCKASQNVGTNVAWYQQKPGQSPKALIYSASYRYSGVPDRFTGSGSGTDFTLTINNVHSEDLAEYFCQQYNTDPLTFGAGTKLEIKRTVAAPSVFIFPPSDEQLKSGTASVVCLLNNFYPREAKVQWKVDNALQSGNSQESVTEQDSKDSTYSLSSTLTLSKADYEKHKVYACEVTHQGLSSPVTKSFNRGEC

SEQ ID NO: 23 - protein, 118 aa, Mus musculus
EVNLVESGGGLVKPGGSLKVSCAASGFTFSSYAMSWVRQTPEKRLEWVASISSGGTTYYPDSVKGRFTISRDNARNILYLQMSSLRSEDTAMYYCARVGGYYDSMDYWGQGISVTDSS

SEQ ID NO: 24 - protein, 123 aa, Rattus norvegicus
EVQLVESGGGLVQPGRSLKLSCAASGFTFSDYYMAWVRQAPTKGLEWVAYIHANGGSTYYRDSVRGRFSISRDNGKSTLYLQMDSLRSEDTATYYCTTGSFMYAADYYIMDAWGQGASVTVSS

SEQ ID NO: 25 - protein, 118 aa, Mus musculus
DVQLQESGPGLVKPSQSLSLTCTVTGYSITSDYAWNWIRQFPGNKLEWMGYISYSGSTRYNPSLKSRISITRDTSKNQFFLQLNSVTSEDTATYYCARQLGLRFFDYWGQGTTLTVSS

SEQ ID NO: 26 - protein, 118 aa, Mus musculus
QVQLQQSGAELMKPGASVKISCKATGYTFSRYWIEWIKQRPGHGLEWIGEILPGSGSSNYNEKFKDKATFTADTSSNTAYMQFSSLTSEDSAVYYCARKVYYYAMDFWGQGTSVTVSS

SEQ ID NO: 27 - protein, 119 aa, Mus musculus
QVQLQQSGAELARPGASVKMSCKASGYTFTSYTMHWVKQRPGQGLEWIGYINPRSVYTNYNQKFKDKATLTADKSSSTAYMQLSSLTSEDSAVYYCARLGGYYDTMDYWGQGTSVTVSS

SEQ ID NO: 28 - protein, 122 aa, Mus musculus
QVTLKESGPGILKPSQTLSLTCSFSGFSLSTSGMGVGWIRQPSGKGLEWLAHIWWDDDKYYSPSLKSQLTISKDTSRNQVFLKITSLDTADTATYYCVRSYYYGSSGAMDYWGQGTSVTVSS

SEQ ID NO: 29 - protein, 117 aa, Mus musculus
EVKLVESGGGFVKPGGSLKLSCAASGFTVRNYAMSWVRQTPEKRLEWVASISTGDRSYLPDSMKGRFTISRDNARNILYLQMSSLRSEDTAIYYCQRYFDFDSFAFWGQGTLVTVSA

SEQ ID NO: 30 - protein, 120 aa, Mus musculus
EVQLQESGPSLVKPSQTLSLTCSVTGDSITSGYWNWIRKFPGNKLEYMGYISYSGSTYYNPSLRGRISITRDTSKSQYYLQLSSVTTEDTATYYCSRRHLGSGYGWFAYWGQGTLVTVSA

SEQ ID NO: 31 - protein, 120 aa, Mus musculus
EVQLQESGPSLVKPSQTLSLTCSVTGDSITSGYWNWIRKFPGNKFEYMGFISYSGNTYYNPSLRSRISITRDTSKNQYFLHLNSVTTEDTATYYCSRRHLISGYGWFAYWGQGTLVTVSA

SEQ ID NO: 32 - protein, 121 aa, Rattus norvegicus
QVTLKESGPGILQPSQTLSLTCTFSGFSLSTYGVGVGWIRQPSGKGLEWLANIWWDDDNYYNPSLIHRLTVSKDTSNNQAFLKITNVDTAETATYYCAQIKEPRDWFFEFWGPGTMVSVSS

SEQ ID NO: 33 - protein, 121 aa, Rattus norvegicus
QVTLKESGPGILQPSQTLSLTCTFSGFSLSTYGVGVGWIRQPSGKGLEWLANIWWDDDKYYNPSLKNRLTISKDTSNNQAFLKITNVDTAETATYYCAQIKEPRDWFFEFWGPGTMVSVSS

SEQ ID NO: 34 - protein, 113 aa, Mus musculus
DIVLTQSPASLAVSLGQRATISCRASESVDNYGVSFMNWFQQKPGQPPKLLIYAASNQGSGVPARFSGSGSGTDFSLNIHPMEEDDTAMYFCQQTKEVTWTFGGGTKLEIKRA

SEQ ID NO: 35 - protein, 113 aa, Rattus norvegicus
DVVMTQTPVSLSVSLGNQASISCRSSQSLLHSDGNTFLSWYFQKPGQSPQLLIYLASNRFSGVSNRFSGSGSGTDFTLKISRVEPEDLGVYYCFQHTHLPLTFGSGTKLEIKR

SEQ ID NO: 36 - protein, 108 aa, Mus musculus
QIVLTQSPALMSASPGEKVTMTCSANSTVNYMYWYQQKPRSSPKPCIYLTSNLASGVPARFSGSGSGTSYSLTISSMEAEDAATYYCQQWNSNPPTFGAGTKLELRRA

SEQ ID NO: 37 - protein, 110 aa, Mus musculus
QIVLTQSPAIMSVSLGERVTVTCTASSSVSSSYFHWYQQKPGSSPKLWIYSTSNLASGVPARFSGSGSGTSYSLTISTMEAEDAATYYCHQYHRSPRTFGGGTKLEIKRA

SEQ ID NO: 38 - protein, 113 aa, Mus musculus
DIVVTQSPASLAVSLGQRATISCRASESVDNYGISFMNWFQQKPGQPPKLLIYAASNQGSGVPARFSGSGSGTDFSLNIHPMEEDDTAVYFCQQSKEVPFTFGSGTKLEIKRA

SEQ ID NO: 39 - protein, 118 aa, Mus musculus
DIVMTQTPLSLPVSLGDQASISCRSSQSLVHSDGNTYLHWYLQKPGQSPKLLIYKVSKRFSGVPDRFSGSGSGTDFTLKISRVEAEDLGVYFCSQSTHVPPTFGGGTKLEIKRADAAP

SEQ ID NO: 40 - protein, 113 aa, Mus musculus
DIQMTQTPSSLSASLGDRVTISCRASQDINNFLNWYQQKPDGSLKLLIYYTSKLHSGVPSRFSGSGSGTDFSLTISNLDQEDVATYFCQQGHTLPPTFGGGTKLEVKRADAAP

SEQ ID NO: 41 - protein, 114 aa, Mus musculus
DIVMTQSHKFMSTSVGDRVSITCKASQDVNTAVAWYQQKPGQSPKLLIYWASTRHTGVPDRFTGSGSGTDYALTINSVQAEDLALYYCQQHSYTPPWTFGGGTKLEIRRADAAP

SEQ ID NO: 42 - protein, 114 aa, Mus musculus
VIVMTQSHKFMSTSIGDRVNITCKASQDVISAVAWYQQKPGQSPKLLIYWASTRHTGVPDRFTGSGSGTDFTLTINSVQAEDRALYYCQQHSYTPPWTFGGGTNLEIKRADAAP

SEQ ID NO: 43 - protein, 113 aa, Rattus norvegicus
DIQMTQTPSSMPASLGERVTIFCRASQGVNNFLTWYQQKPDGTIKPLIFYTSNLQSGVPSRFSGSGSGTDYSLSISSLEPEDFAMYYCQQYHGFPNTFGAGTKLELKRADAAP

SEQ ID NO: 44 - protein, 113 aa, Rattus norvegicus
DIQMTQTPSSMPASLGERVTIFCRASQGVNNYLTWYQQKPDGTIKPLIFYTSNLQSGVPSRFSGSGSGTDYSLSISSLEPEDFAMYYCQQYHGFPNTFGAGTKLELKRADAAP

SEQ ID NO: 45 - protein, 122 aa, Artificial Sequence
  humanized antibody sequence
  VARIANT (24)..(24): Can be A or F
  VARIANT (69)..(69): Can be F or L
  VARIANT (73)..(73): Can be R or K
  VARIANT (75)..(75): Can be N or T
  VARIANT (80)..(80): Can be L or V
  VARIANT (98)..(98): Can be A or V
QVQLVESGGGVVQPGRSLRLSCAXSGFSLSTSGMGVGWVRQAPGKGLEWVAHIWWDDDKYYSPSLKSRXTISXDXSKNTXYLQMNSLRAEDTAVYYCXRSYYYGSSGAMDYWGQGTLVTVSS

SEQ ID NO: 46 - protein, 113 aa, Artificial Sequence
  Humanized antibody sequence
DIVMTQSPLSLPVTPGEPASISCRSSQSLVHSDGNTYLHWYLQKPGQSPQLLIYKVSKRFSGVPDRFSGSGSGTDFTLKISRVEAEDVGVYYCSQSTHVPPTFGQGTKVEIKR

SEQ ID NO: 47 - protein, 123 aa, Artificial Sequence
  Humanized antibody sequence
  VARIANT (97)..(97): Can be A or T
  VARIANT (98)..(98): Can be R or T
QVQLVESGGGVVQPGRSLRLSCAASGFTFSDYYMAWVRQAPGKGLEWVAYIHANGGSTYYRDSVRGRFTISRDNSKNTLYLQMNSLRAEDTAVYYCXXGSFMYAADYYIMDAWGQGTLVTVSS

SEQ ID NO: 48 - protein, 113 aa, Artificial Sequence
  Humanized antibody sequence
DIVMTQSPLSLPVTPGEPASISCRSSQSLLHSDGNTFLSWYLQKPGQSPQLLIYLASNRFSGVPDRFSGSGSGTDFTLKISRVEAEDVGVYYCFQHTHLPLTFGQGTKVEIKR

SEQ ID NO: 49 - protein, 118 aa, Artificial Sequence
  Humanized antibody sequence
  VARIANT (48)..(48): Can be M or I
  VARIANT (68)..(68): Can be V or A
  VARIANT (70)..(70): Can be M or F
  VARIANT (72)..(72): Can be T or A
QVQLVQSGAEVKKPGASVKVSCKASGYTFSRYWIEWVRQAPGQGLEWXGEILPGSGSSNYNEKFKDRXTXTXDTSTSTAYMELRSLRSDDTAVYYCARKVYYYAMDFWGQGTLVTVSS

SEQ ID NO: 50 - protein, 109 aa, Artificial Sequence
  Humanized antibody sequence
  VARIANT (48)..(48): Can be L or W
  VARIANT (72)..(72): Can be F or Y
EIVLTQSPGTLSLSPGERATLSCTASSSVSSSYFHWYQQKPGQAPRLXIYSTSNLASGIPDRFSGSGSGTDXTLTISRLEPEDFAVYYCHQYHRSPRTFGQGTKVEIKR

SEQ ID NO: 51 - protein, 121 aa, Artificial Sequence
  Humanized antibody sequence
  VARIANT (24)..(24): Can be V or F
  VARIANT (50)..(50): Can be I or L
  VARIANT (51)..(51): Can be G or A
  VARIANT (69)..(69): Can be V or L
  VARIANT (71)..(71): Can be I or V
  VARIANT (73)..(73): Can be V or K
  VARIANT (80)..(80): Can be F or A
  VARIANT (99)..(99): Can be R or Q
QVQLQESGPGLVKPSETLSLTCTXSGFSLSTYGVGVGWIRQPPGKGLEWXXNIWWDDDNYYNPSLIHRXTXSXDTSKNQXSLKLSSVTAADTAVYYCAXIKEPRDWFFEFWGQGTLVTVSS

SEQ ID NO: 52 - protein, 108 aa, Artificial Sequence
  Humanized antibody sequence
  VARIANT (46)..(46): Can be L or P
  VARIANT (49)..(49): Can be Y or F
  VARIANT (71)..(71): Can be F or Y
DIQMTQSPSSLSASVGDRVTITCRASQGVNNFLTWYQQKPGKAPKXLIXYTSNLQSGVPSRFSGSGSGTDXTLTISSLQPEDFATYYCQQYHGFPNTFGQGTKVEIKR

SEQ ID NO: 53 - protein, 121 aa, Artificial Sequence
  Humanized antibody sequence
  VARIANT (24)..(24): Can be V or F
  VARIANT (50)..(50): Can be I or L
  VARIANT (51)..(51): Can be G or A
  VARIANT (69)..(69): Can be V or L
  VARIANT (73)..(73): Can be V or K
  VARIANT (80)..(80): Can be F or A
  VARIANT (99)..(99): Can be R or Q
QVQLQESGPGLVKPSETLSLTCTXSGFSLSTYGVGVGWIRQPPGKGLEWXXNIWWDDDKYYNPSLKNRXTISXDTSKNQXSLKLSSVTAADTAVYYCAXIKEPRDWFFEFWGQGTLVTVSS

SEQ ID NO: 54 - protein, 108 aa, Artificial Sequence
  Humanized antibody sequence
  VARIANT (46)..(46): Can be L or P
  VARIANT (49)..(49): Can be Y or F
  VARIANT (71)..(71): Can be F or Y
DIQMTQSPSSLSASVGDRVTITCRASQGVNNYLTWYQQKPGKAPKXLIXYTSNLQSGVPSRFSGSGSGTDXTLTISSLQPEDFATYYCQQYHGFPNTFGQGTKVEIKR

SEQ ID NO: 55 - protein, 117 aa, Artificial Sequence
  Humanized antibody sequence
  VARIANT (96)..(96): Can be A or Q
QVQLVESGGGVVQPGRSLRLSCAASGFTVRNYAMSWVRQAPGKGLEWVASISTGDRSYLPDSMKGRFTISRDNSKNTLYLQMNSLRAEDTAVYYCXRYFDFDSFAFWGQGTLVTVSS

SEQ ID NO: 56 - protein, 108 aa, Artificial Sequence
  Humanized antibody sequence
DIQMTQSPSSLSASVGDRVTITCRASQDINNFLNWYQQKPGKAPKLLIYYTSKLHSGVPSRFSGSGSGTDFTLTISSLQPEDFATYYCQQGHTLPPTFGQGTKVEIKR

SEQ ID NO: 57 - protein, 120 aa, Artificial Sequence
  Humanized antibody sequence
  VARIANT (47)..(47): Can be W or Y
  VARIANT (48)..(48): Can be I or M
  VARIANT (71)..(71): Can be V or R
  VARIANT (96)..(96): Can be A or S
QVQLQESGPGLVKPSETLSLTCTVSGDSITSGYWNWIRQPPGKGLEXXGYISYSGSTYYNPSLRGRVTISXDTSKNQFSLKLSSVTAADTAVYYCXRRHLGSGYGWFAYWGQGTLVTVSS

SEQ ID NO: 58 - protein, 109 aa, Artificial Sequence
  Humanized antibody sequence
  VARIANT (71)..(71): Can be F or Y
DIVMTQSPDSLAVSLGERATINCKASQDVNTAVAWYQQKPGQPPKLLIYWASTRHTGVPDRFSGSGSGTDXTLTISSLQAEDVAVYYCQQHSYTPPWTFGQGTKVEIKR

SEQ ID NO: 59 - protein, 118 aa, Artificial Sequence
  Humanized antibody sequence
QVQLVESGGGVVQPGRSLRLSCAASGFTFSSYAMSWVRQAPGKGLEWVASISSGGTTYYPDSVKGRFTISRDNSKNTLYLQMNSLRAEDTAVYYCARVGGYYDSMDYWGQGTLVTVSS

SEQ ID NO: 60 - protein, 112 aa, Artificial Sequence
  Humanized antibody sequence
  VARIANT (31)..(31): Can be N or Q
  VARIANT (57)..(57): Can be N or Q
EIVLTQSPGTLSLSPGERATLSCRASESVDXYGVSFMNWYQQKPGQAPRLLIYAASXQGSGIPDRFSGSGSGTDFTLTISRLEPEDFAVYYCQQTKEVTWTFGQGTKVEIKR

SEQ ID NO: 61 - protein, 120 aa, Artificial Sequence
  Humanized antibody sequence
  VARIANT (47)..(47): Can be W or Y
  VARIANT (48)..(48): Can be I or M
  VARIANT (67)..(67): Can be V or I
  VARIANT (71)..(71): Can be V or R
  VARIANT (78)..(78): Can be F or Y
  VARIANT (96)..(96): Can be A or S
QVQLQESGPGLVKPSETLSLTCTVSGDSITSGYWNWIRQPPGKGLEXXGFISYSGNTYYNPSLRSRXTISXDTSKNQXSLKLSSVTAADTAVYYCXRRHLISGYGWFAYWGQGTLVTVSS

SEQ ID NO: 62 - protein, 109 aa, Artificial Sequence
  Humanized antibody sequence
  VARIANT (1)..(1): Can be D or V
XIVMTQSPDSLAVSLGERATINCKASQDVISAVAWYQQKPGQPPKLLIYWASTRHTGVPDRFSGSGSGTDFTLTISSLQAEDVAVYYCQQHSYTPPWTFGQGTKVEIKR

SEQ ID NO: 63 - protein, 119 aa, Artificial Sequence
  Humanized antibody sequence
  VARIANT (48)..(48): Can be M or I
  VARIANT (68)..(68): Can be V or A
  VARIANT (70)..(70): Can be M or L
  VARIANT (72)..(72): Can be T or A
  VARIANT (74)..(74): Can be T or K
QVQLVQSGAEVKKPGASVKVSCKASGYTFTSYTMHWVRQAPGQGLEWXGYINPRSVYTNYNQKFKDRXTXTXDXSTSTAYMELRSLRSDDTAVYYCARLGGYYDTMDYWGQGTLVTVSS

SEQ ID NO: 64 - protein, 112 aa, Artificial Sequence
  Humanized antibody sequence
DIQMTQSPSSLSASVGDRVTITCRASESVDNYGISFMNWYQQKPGKAPKLLIYAASNQGSGVPSRFSGSGSGTDFTLTISSLQPEDFATYYCQQSKEVPFTFGQGTKVEIKR

SEQ ID NO: 65 - protein, 118 aa, Artificial Sequence
  Humanized antibody sequence
  VARIANT (49)..(49): Can be I or M
  VARIANT (68)..(68): Can be V or I
  VARIANT (72)..(72): Can be V or R
QVQLQESGPGLVKPSETLSLTCTVSGYSITSDYAWNWIRQPPGKGLEWXGYISYSGSTRYNPSLKSRXTISXDTSKNQFSLKLSSVTAADTAVYYCARQLGLRFFDYWGQGTLVTVSS

SEQ ID NO: 66 - protein, 107 aa, Artificial Sequence
  Humanized antibody sequence
  VARIANT (45)..(45): Can be L or P
  VARIANT (46)..(46): Can be L or C
EIVLTQSPGTLSLSPGERATLSCSANSTVNYMYWYQQKPGQAPRXXIYLTSNLASGIPDRFSGSGSGTDFTLTISRLEPEDFAVYYCQQWNSNPPTFGQGTKVEIKR

SEQ ID NO: 67 - protein, 10 aa, Mus musculus
GFTFSSYAMS

SEQ ID NO: 68 - protein, 10 aa, Rattus norvegicus
GFTFSDYYMA

SEQ ID NO: 69 - protein, 11 aa, Mus musculus
GYSITSDYAWN

SEQ ID NO: 70 - protein, 10 aa, Mus musculus
GYTFSRYWIE

SEQ ID NO: 71 - protein, 10 aa, Mus musculus
GYTFTSYTMH

SEQ ID NO: 72 - protein, 12 aa, Mus musculus
GFSLSTSGMGVG

SEQ ID NO: 73 - protein, 10 aa, Mus musculus
GFTVRNYAMS

SEQ ID NO: 74 - protein, 10 aa, Mus musculus
GDSITSGYWN

SEQ ID NO: 75 - protein, 10 aa, Mus musculus
GDSITSGYWN

SEQ ID NO: 76 - protein, 12 aa, Rattus norvegicus
GFSLSTYGVGVG

SEQ ID NO: 77 - protein, 12 aa, Rattus norvegicus
GFSLSTYGVGVG

SEQ ID NO: 78 - protein, 16 aa, Mus musculus
SISSGGTTYYPDSVKG

SEQ ID NO: 79 - protein, 17 aa, Rattus norvegicus
YIHANGGSTYYRDSVRG

SEQ ID NO: 80 - protein, 16 aa, Mus musculus
YISYSGSTRYNPSLKS

SEQ ID NO: 81 - protein, 17 aa, Mus musculus
EILPGSGSSNYNEKFKD

SEQ ID NO: 82 - protein, 17 aa, Mus musculus
YINPRSVYTNYNQKFKD

SEQ ID NO: 83 - protein, 16 aa, Mus musculus
HIWWDDDKYYSPSLKS

SEQ ID NO: 84 - protein, 16 aa, Mus musculus
SISTGDRSYLPDSMKG

SEQ ID NO: 85 - protein, 16 aa, Mus musculus
YISYSGSTYYNPSLRG

SEQ ID NO: 86 - protein, 16 aa, Mus musculus
FISYSGNTYYNPSLRS

SEQ ID NO: 87 - protein, 16 aa, Rattus norvegicus
NIWWDDDNYYNPSLIH

SEQ ID NO: 88 - protein, 16 aa, Rattus norvegicus
NIWWDDDKYYNPSLKN

SEQ ID NO: 89 - protein, 10 aa, Mus musculus
VGGYYDSMDY

SEQ ID NO: 90 - protein, 14 aa, Rattus norvegicus
GSFMYAADYYIMDA

SEQ ID NO: 91 - protein, 9 aa, Mus musculus
QLGLRFFDY

SEQ ID NO: 92 - protein, 9 aa, Mus musculus
KVYYYAMDF

SEQ ID NO: 93 - protein, 10 aa, Mus musculus
LGGYYDTMDY

SEQ ID NO: 94 - protein, 23 aa, Mus musculus
SYYYGSSGAMDYWGQGTSVTVSS

SEQ ID NO: 95 - protein, 20 aa, Mus musculus
YFDFDSFAFWGQGTLVTVSA

SEQ ID NO: 96 - protein, 23 aa, Mus musculus
RHLGSGYGWFAYWGQGTLVTVSA

SEQ ID NO: 97 - protein, 23 aa, Mus musculus
RHLISGYGWFAYWGQGTLVTVSA

SEQ ID NO: 98 - protein, 22 aa, Rattus norvegicus
IKEPRDWFFEFWGPGTMVSVSS

SEQ ID NO: 99 - protein, 22 aa, Rattus norvegicus
IKEPRDWFFEFWGPGTMVSVSS

SEQ ID NO: 100 - protein, 15 aa, Mus musculus
RASESVDNYGVSFMN

SEQ ID NO: 101 - protein, 16 aa, Rattus norvegicus
RSSQSLLHSDGNTFLS

SEQ ID NO: 102 - protein, 10 aa, Mus musculus
SANSTVNYMY

SEQ ID NO: 103 - protein, 12 aa, Mus musculus
TASSSVSSSYFH

SEQ ID NO: 104 - protein, 15 aa, Mus musculus
RASESVDNYGISFMN

SEQ ID NO: 105 - protein, 16 aa, Mus musculus
RSSQSLVHSDGNTYLH

SEQ ID NO: 106 - protein, 11 aa, Mus musculus
RASQDINNFLN

SEQ ID NO: 107 - protein, 11 aa, Mus musculus
KASQDVNTAVA

SEQ ID NO: 108 - protein, 11 aa, Mus musculus
KASQDVISAVA

SEQ ID NO: 109 - protein, 11 aa, Rattus norvegicus
RASQGVNNFLT

SEQ ID NO: 110 - protein, 11 aa, Rattus norvegicus
RASQGVNNYLT

SEQ ID NO: 111 - protein, 7 aa, Mus musculus
AASNQGS

SEQ ID NO: 112 - protein, 7 aa, Rattus norvegicus
LASNRFS

SEQ ID NO: 113 - protein, 7 aa, Mus musculus
LTSNLAS

SEQ ID NO: 114 - protein, 7 aa, Mus musculus
STSNLAS

SEQ ID NO: 115 - protein, 7 aa, Mus musculus
AASNQGS

SEQ ID NO: 116 - protein, 7 aa, Mus musculus
KVSKRFS

SEQ ID NO: 117 - protein, 7 aa, Mus musculus
YTSKLHS

SEQ ID NO: 118 - protein, 7 aa, Mus musculus
WASTRHT

SEQ ID NO: 119 - protein, 7 aa, Mus musculus
WASTRHT

SEQ ID NO: 120 - protein, 7 aa, Rattus norvegicus
YTSNLQS

SEQ ID NO: 121 - protein, 7 aa, Rattus norvegicus
YTSNLQS

SEQ ID NO: 122 - protein, 9 aa, Mus musculus
QQTKEVTWT

SEQ ID NO: 123 - protein, 9 aa, Rattus norvegicus
FQHTHLPLT

SEQ ID NO: 124 - protein, 9 aa, Mus musculus
QQWNSNPPT

SEQ ID NO: 125 - protein, 9 aa, Mus musculus
HQYHRSPRT

SEQ ID NO: 126 - protein, 9 aa, Mus musculus
QQSKEVPFT

SEQ ID NO: 127 - protein, 9 aa, Mus musculus
SQSTHVPPT

SEQ ID NO: 128 - protein, 9 aa, Mus musculus
QQGHTLPPT

SEQ ID NO: 129 - protein, 10 aa, Mus musculus
QQHSYTPPWT

SEQ ID NO: 130 - protein, 10 aa, Mus musculus
QQHSYTPPWT

SEQ ID NO: 131 - protein, 9 aa, Rattus norvegicus
QQYHGFPNT

SEQ ID NO: 132 - protein, 9 aa, Rattus norvegicus
QQYHGFPNT

SEQ ID NO: 133 - protein, 118 aa, Artificial Sequence
  Synthetic clone: 2155 VH
EVKLVESGGGLVKPGGSLKLSCGASGFTISSYAMSWVRQSPEKRLEWVAIISTGGSTYYPDSVRGRFTISRDNARNSLYLQMSSLRSEDTAMYYCARVGGYYDSMDHWGQGTSVTVSS

SEQ ID NO: 134 - protein, 111 aa, Artificial Sequence
  Synthetic clone: 2155 VL
DIVLTQSPASLAVSLGQRATISCRASETVDNYGISFMNWFQQKPGQSPKLLIYAASNQGSGVPARFSGSGSGTDFSLNIHPMEEDDTAMYFCQQSKEVPWTFGGGTKLEIK

SEQ ID NO: 135 - protein, 115 aa, Artificial Sequence
  Synthetic clone: 2155 HC1 VH
QVTLVESGGGLVKPGGSLTLSCGASGFTISSYAMSWVRQSPGKALEWVAIISTGGSTYYPDSVRGRFTISRDNAKNSLYLTMSSLDSVDTAMYYCARVGGYYDSMDHWGQGTSVT

SEQ ID NO: 136 - protein, 115 aa, Artificial Sequence
  Synthetic clone: 2155 HC2 VH
QVTLVESGGGLVKPGGSLTLSCGASGFTISSYAMSWVRQSPGKALEWVAIISTGGSTYYPDSVRGRFTISRDNAKNSLYLTMSSLDSVDTATYYCARVGGYYDSMDHWGQGTSVT

SEQ ID NO: 137 - protein, 115 aa, Artificial Sequence
  Synthetic clone: 2155 HC3a VH
QVTLVESGGGLVKPGGSLTLSCGASGFTISSYAMSWVRQSPGKALEWVAIISTGGSTYYPDKFRGRFTISRDNAKNSLYLTMSSLRSEDTATYYCARVGGYYDSMDHWGQGTSVT

SEQ ID NO: 138 - protein, 115 aa, Artificial Sequence
  Synthetic clone: 2155 HC3b VH
QVTLKESGGGLVKPGGSLTLSCGASGFTISSYAMSWVRQSPGKALEWVAIISTGGSTYYPDKFRGRFTISRDNAKNSLYLTMSSLRSEDTATYYCARVGGYYDSMDHWGQGTSVT

SEQ ID NO: 139 - protein, 115 aa, Artificial Sequence
  Synthetic clone: 2155 HC4 VH
EVQLVESGGGLIQPGGSLKLSCAASGFTISSYAMSWVRQAPGKGLEWVAIISTGGSTYYADSVKGRFTISRDNSKNTLYLQMNSLRAEDTAVYYCARVGGYYDSMDHWGQGTSVT

SEQ ID NO: 140 - protein, 109 aa, Artificial Sequence
  Synthetic clone: 2155 LC1 VL
DIVLTQSPASLAASVGDRATISCRASETVDNYGISFMNWFQQKPGKSPKLLIYAASNQGSGVPARFSGSGSGTDFSLNIHPMQPDDTATYFCQQSKEVPWTFGGGTKLE

SEQ ID NO: 141 - protein, 109 aa, Artificial Sequence
  Synthetic clone: 2155 LC2a VL
DIVLTQSPASLSASVGDRATISCRASETVDNYGISFMNWFQQKPGQSPKLLIYAASNQGSGVPARFSGSGSGTDFSLTISPMQPDDTATYYCQQSKEVPWTFGGGTKLE

SEQ ID NO: 142 - protein, 109 aa, Artificial Sequence
  Synthetic clone: 2155 LC2b VL
DIVLTQSPASLSASVGDRATISCRASETVDNYGISYMNWFQQKPGQSPKLLIYAASNQGSGVPARFSGSGSGTDFSLTISPMQPDDTATYYCQQSKEVPWTFGGGTKLE

SEQ ID NO: 143 - protein, 109 aa, Artificial Sequence
  Synthetic clone: 2155 LC3 VL
DIVLTQSPASLAVSPGQRATITCRASETVDNYGISFMNWFQQKPGQPPKLLIYAASNQGSGVPARFSGSGSGTDFTLTINPVEADDTANYYCQQSKEVPWTFGQGTKVE

SEQ ID NO: 144 - protein, 118 aa, Artificial Sequence
  Synthetic clone: 698 VH
EVQLQQSGTVLARPGASVKMSCEASGYSFTTYWMHWIKQRPGQGLEWIGAIYPGNSDTGYNQKFKGKAKLTAVTSATTAYMELSSLTDEDSAVYYCTRTSTYPHFDYWGQGTTLTVSS

SEQ ID NO: 145 - protein, 107 aa, Artificial Sequence
  Synthetic clone: 698 VL
DILLTQSPAILSVSPGERVSFSCRASQSIGTSIHWYQQRTNGSPRLLIKYASESISGIPSRFSGSGSGTDFTLNINSVESEDIADYYCQQSNNWPLTFGAGTKLELK

SEQ ID NO: 146 - protein, 118 aa, Artificial Sequence
  Synthetic clone: 706 VH
EVQLQQSGTVLARPGASVKMSCEASGYSFTTYWMHWIKQRPGQGLEWIGAIYPGNSDTGYNQKFKGKAKLTAVTSASTAYMELSSLTNEDSAVYYCTRTSTYPHFDYWGQGTTLTVSS

SEQ ID NO: 147 - protein, 107 aa, Artificial Sequence
  Synthetic clone: 706 VL
DILLTQSPAILSVSPGERVSFSCRASQSIGTSIHWYQQRTNGSPRLLIKYASESISGIPSRFSGSGSGTDFTLNINSVESEDIADYYCQQTNNWPLTFGAGTKLELK

SEQ ID NO: 148 - protein, 118 aa, Artificial Sequence
  Synthetic clone: 827 VH
EVQLQQSGTVLARPGASVKMSCETSGYSFTTYWIHWIKQRPGQGLEWIATIYPGNSDAGYNQKFRGKAKLTAVTSASTAYMELSSLTNEDSAVYYCTRSSTYPHFDYWGQGTTLTVSS

SEQ ID NO: 149 - protein, 107 aa, Artificial Sequence
  Synthetic clone: 827 VL, 1649 VL
DILLTQSPAILSVSPGERVSFSCRASQSIGTSIHWYQQRTNDSPRLLIKYASESISGIPSRFSGSGSGTDFTLNINSVESEDIADYYCQQTNNWPLTFGAGTKLELK

SEQ ID NO: 150 - protein, 118 aa, Artificial Sequence
  Synthetic clone: 1718 VH
QVQVQQSGPELVKPGASVRISCKASDYTFTNYYIHWVRQRPGQGLEWLGWIYPGKGYTNYNEKFKGKATLTADKSSSTAYMQFSSLTSEDSAVYFCASGYGNYYFPYWGQGTLVTVSA

SEQ ID NO: 151 - protein, 106 aa, Artificial Sequence
  Synthetic clone: 1718 VL
IQMTQSSSYLSVSLGGRVTITCKASDHIKNWLAWYQQKPGNVPRLLMSAATSLETGFPSRFSGSGSGKDFTLTITSLQTEDVATYYCQQYWSTPWTFGGGTKLEIK

SEQ ID NO: 152 - protein, 10 aa, Artificial Sequence
  Synthetic clone: 2155 HCDR3
VGGYYDSMDH

SEQ ID NO: 153 - protein, 9 aa, Artificial Sequence
  Synthetic clone: 2155 HCDR2
IISTGGSTY

SEQ ID NO: 154 - protein, 10 aa, Artificial Sequence
  Synthetic clone: 2155 HCDR1
GFTISSYAMS

SEQ ID NO: 155 - protein, 9 aa, Artificial Sequence
  Synthetic clone: 2155 LCDR3
QQSKEVPWT

SEQ ID NO: 156 - protein, 7 aa, Artificial Sequence
  Synthetic clone: 2155 LCDR2
AASNQGS

SEQ ID NO: 157 - protein, 15 aa, Artificial Sequence
  Synthetic clone: 2155 LCDR1
RASETVDNYGISFMN

SEQ ID NO: 158 - protein, 9 aa, Artificial Sequence
  Synthetic clone: 698 HCDR3, 706 HCDR3
TSTYPHFDY

SEQ ID NO: 159 - protein, 10 aa, Artificial Sequence
  Synthetic clone: 698 HCDR2, 706 HCDR2
AIYPGNSDTG

SEQ ID NO: 160 - protein, 10 aa, Artificial Sequence
  Synthetic clone: 698 HCDR1, 706 HCDR1
GYSFTTYWMH

SEQ ID NO: 161 - protein, 9 aa, Artificial Sequence
  Synthetic clone: 698 LCDR3
QQSNNWPLT

SEQ ID NO: 162 - protein, 8 aa, Artificial Sequence
  Synthetic clone: 698 LCDR2, 706 LCDR2, 827 LCDR2, 1649 LCDR2
KYASESIS

SEQ ID NO: 163 - protein, 11 aa, Artificial Sequence
  Synthetic clone: 698 LCDR1, 706 LCDR1, 827 LCDR1, 1649 LCDR1
RASQSIGTSIH

SEQ ID NO: 164 - protein, 9 aa, Artificial Sequence
  Synthetic clone: 706 LCDR3, 827 LCDR3, 1649 LCDR3
QQTNNWPLT

SEQ ID NO: 165 - protein, 9 aa, Artificial Sequence
  Synthetic clone: 827 HCDR3, 1649 HCDR3
SSTYPHFDY

SEQ ID NO: 166 - protein, 10 aa, Artificial Sequence
  Synthetic clone: 827 HCDR2
TIYPGNSDAG

SEQ ID NO: 167 - protein, 10 aa, Artificial Sequence
  Synthetic clone: 1649 HCDR2
AIYPGNSDAG

SEQ ID NO: 168 - protein, 9 aa, Artificial Sequence
  Synthetic clone: 1718 HCDR3
GYGNYYFPY

SEQ ID NO: 169 - protein, 10 aa, Artificial Sequence
  Synthetic clone: 1718 HCDR2
WIYPGKGYTN

SEQ ID NO: 170 - protein, 9 aa, Artificial Sequence
  Synthetic clone: 1718 HCDR1
DYTFTNYYI

SEQ ID NO: 171 - protein, 9 aa, Artificial Sequence
  Synthetic clone: 1718 LCDR3
QQTWSTPWT

SEQ ID NO: 172 - protein, 7 aa, Artificial Sequence
  Synthetic clone: 1718 LCDR2
AATSLET

SEQ ID NO: 173 - protein, 11 aa, Artificial Sequence
  Synthetic clone: 1718 LCDR1
KASDHIKNWLA

SEQ ID NO: 174 - protein, 10 aa, Artificial Sequence
  Synthetic clone: 827 HCDR1, 1649 HCDR1
GYSFTTYWIH

SEQ ID NO: 175 - protein, 453 aa, Artificial Sequence
  1D7 heavy chain
QVQLVESGGGVVQPGRSLRLSCAASGFTFSSYGMHWVRQAPGKGLEWVTVIWYEGSNKYYADSVKGRFTISRDNSKNTLYLQMNSLRAEDTAVYYCARGGQLGKYYYYGMDVWGQGTTVTVSSASTKGPSVFPLAPSSKSTSGGTAALGCLVKDYFPEPVTVSWNSGALTSGVHTFPAVLQSSGLYSLSSVVTVPSSSLGTQTYICNVNHKPSNTKVDKRVEPKSCDKTHTCPPCPAPELLGGPSVFLFPPKPKDTLMISRTPEVTCVVVDVSHEDPEVKFNWYVDGVEVHNAKTKPREEQYNSTYRVVSVLTVLHQDWLNGKEYKCKVSNKALPAPIEKTISKAKGQPREPQVYTLPPSREEMTKNQVSLTCLVKGFYPSDIAVEWESNGQPENNYKTTPPVLDSDGSFFLYSKLTVDKSRWQQGNVFSCSVMHEALHNHYTQKSLSLSPGK

SEQ ID NO: 176 - protein, 214 aa, Artificial Sequence
  1D7 light chain
DIQMTQSPSSLSASVGDRVTITCRASQGIRNDLGWYQQKPGKAPKRLIYDASSLQSGVPSRFSGSGSGTEFTLTISSLQPEDFATYYCLQHNNYPWTFGQGTKVEIKRTVAAPSVFIFPPSDEQLKSGTASVVCLLNNFYPREAKVQWKVDNALQSGNSQESVTEQDSKDSTYSLSSTLTLSKADYEKHKVYACEVTHQGLSSPVTKSFNRGEC

SEQ ID NO: 177 - protein, 123 aa, Artificial Sequence
  1D7 variable heavy chain
QVQLVESGGGVVQPGRSLRLSCAASGFTFSSYGMHWVRQAPGKGLEWVTVIWYEGSNKYYADSVKGRFTISRDNSKNTLYLQMNSLRAEDTAVYYCARGGQLGKYYYYGMDVWGQGTTVTVSS

SEQ ID NO: 178 - protein, 108 aa, Artificial Sequence
  1D7 variable light chain
DIQMTQSPSSLSASVGDRVTITCRASQGIRNDLGWYQQKPGKAPKRLIYDASSLQSGVPSRFSGSGSGTEFTLTISSLQPEDFATYYCLQHNNYPWTFGQGTKVEIKR

SEQ ID NO: 179 - protein, 5 aa, Artificial Sequence
  1D7 heavy chain CDR1
SYGMH

SEQ ID NO: 180 - protein, 17 aa, Artificial Sequence
  1D7 heavy chain CDR2
VIWYEGSNKYYADSVKG

SEQ ID NO: 181 - protein, 14 aa, Artificial Sequence
  1D7 heavy chain CDR3
GGQLGKYYYYGMDV

SEQ ID NO: 182 - protein, 11 aa, Artificial Sequence
  1D7 light chain CDR1
RASQGIRNDLG

SEQ ID NO: 183 - protein, 7 aa, Artificial Sequence
  1D7 light chain CDR2
DASSLQS

SEQ ID NO: 184 - protein, 9 aa, Artificial Sequence
  1D7 light chain CDR3
LQHNNYPWT

SEQ ID NO: 185 - protein, 453 aa, Artificial Sequence
  33C9 heavy chain
QVQVVESGGGVVQPGRSLRLSCAASGFTFSSYGMHWVRQAPGKGLEWVSVIWYEGSNKYYADSVKGRFTISRDNSKNTLYLQMNSLRAEDTAVYYCARGGLLGYYYYYGMDVWGQGTTVTVSSASTKGPSVFPLAPSSKSTSGGTAALGCLVKDYFPEPVTVSWNSGALTSGVHTFPAVLQSSGLYSLSSVVTVPSSSLGTQTYICNVNHKPSNTKVDKKVEPKSCDKTHTCPPCPAPELLGGPSVFLFPPKPKDTLMISRTPEVTCVVVDVSHEDPEVKFNWYVDGVEVHNAKTKPREEQYNSTYRVVSVLTVLHQDWLNGKEYKCKVSNKALPAPIEKTISKAKGQPREPQVYTLPPSREEMTKNQVSLTCLVKGFYPSDIAVEWESNGQPENNYKTTPPVLDSDGSFFLYSKLTVDKSRWQQGNVFSCSVMHEALHNHYTQKSLSLSPGK

SEQ ID NO: 186 - protein, 214 aa, Artificial Sequence
  33C9 light chain
DIQMTQSPSSLSASVGDRVTITCRASQGIRNDLGWYQQKPGKAPKRLIYDASSLQSGVPSRFSGSGSGTEFTLTISSLQPEDFATYYCLQHHSYPWTFGQGTKVEIKRTVAAPSVFIFPPSDEQLKSGTASVVCLLNNFYPREAKVQWKVDNALQSGNSQESVTEQDSKDSTYSLSSTLTLSKADYEKHKVYACEVTHQGLSSPVTKSFNRGEC

SEQ ID NO: 187 - protein, 123 aa, Artificial Sequence
  33C9 variable heavy chain
QVQVVESGGGVVQPGRSLRLSCAASGFTFSSYGMHWVRQAPGKGLEWVSVIWYEGSNKYYADSVKGRFTISRDNSKNTLYLQMNSLRAEDTAVYYCARGGLLGYYYYYGMDVWGQGTTVTVSS

SEQ ID NO: 188 - protein, 108 aa, Artificial Sequence
  33C9 variable light chain
DIQMTQSPSSLSASVGDRVTITCRASQGIRNDLGWYQQKPGKAPKRLIYDASSLQSGVPSRFSGSGSGTEFTLTISSLQPEDFATYYCLQHHSYPWTFGQGTKVEIKR

SEQ ID NO: 189 - protein, 5 aa, Artificial Sequence
  33C9 heavy chain CDR1
SYGMH

SEQ ID NO: 190 - protein, 17 aa, Artificial Sequence
  33C9 heavy chain CDR2
VIWYEGSNKYYADSVKG

SEQ ID NO: 191 - protein, 14 aa, Artificial Sequence
  33C9 heavy chain CDR3
GGLLGYYYYYGMDV

SEQ ID NO: 192 - protein, 11 aa, Artificial Sequence
  33C9 light chain CDR1
RASQGIRNDLG

SEQ ID NO: 193 - protein, 7 aa, Artificial Sequence
  33C9 light chain CDR2
DASSLQS

SEQ ID NO: 194 - protein, 9 aa, Artificial Sequence
  33C9 light chain CDR3
LQHHSYPWT

SEQ ID NO: 195 - protein, 453 aa, Artificial Sequence
  33F6 heavy chain
QVQLVESGGGVVQPGRSLRLSCAASGFTFSNYGMHWVRQAPGKGLEWVAVIWYVGSNKYYADSVKGRFTISRDNSKNTLYLQMNSLRAEDTAVYYCARGGELRLYYYYGMDVWGQGTTVTVSSASTKGPSVFPLAPSSKSTSGGTAALGCLVKDYFPEPVTVSWNSGALTSGVHTFPAVLQSSGLYSLSSVVTVPSSSLGTQTYICNVNHKPSNTKVDKKVEPKSCDKTHTCPPCPAPELLGGPSVFLFPPKPKDTLMISRTPEVTCVVVDVSHEDPEVKFNWYVDGVEVHNAKTKPREEQYNSTYRVVSVLTVLHQDWLNGKEYKCKVSNKALPAPIEKTISKAKGQPREPQVYTLPPSREEMTKNQVSLTCLVKGFYPSDIAVEWESNGQPENNYKTTPPVLDSDGSFFLYSKLTVDKSRWQQGNVFSCSVMHEALHNHYTQKSLSLSPGK

SEQ ID NO: 196 - protein, 214 aa, Artificial Sequence
  33F6 light chain
DIQMTQSPSSLSASVGDRVTITCRASQGIRNDLGWYQQKPGKAPKRLIYAASSLQSGVPSRFSGSGSGTEFTLTVSSLQPEDFATYYCLQLNSYPWTFGQGTKVEIKRTVAAPSVFIFPPSDEQLKSGTASVVCLLNNFYPREAKVQWKVDNALQSGNSQESVTEQDSKDSTYSLSSTLTLSKADYEKHKVYACEVTHQGLSSPVTKSFNRGEC

SEQ ID NO: 197 - protein, 123 aa, Artificial Sequence
  33F6 variable heavy chain
QVQLVESGGGVVQPGRSLRLSCAASGFTFSNYGMHWVRQAPGKGLEWVAVIWYVGSNKYYADSVKGRFTISRDNSKNTLYLQMNSLRAEDTAVYYCARGGELRLYYYYGMDVWGQGTTVTVSS

SEQ ID NO: 198 - protein, 108 aa, Artificial Sequence
  33F6 variable light chain
DIQMTQSPSSLSASVGDRVTITCRASQGIRNDLGWYQQKPGKAPKRLIYAASSLQSGVPSRFSGSGSGTEFTLTVSSLQPEDFATYYCLQLNSYPWTFGQGTKVEIKR

SEQ ID NO: 199 - protein, 5 aa, Artificial Sequence
  33F6 heavy chain CDR1
NYGMH

SEQ ID NO: 200 - protein, 17 aa, Artificial Sequence
  33F6 heavy chain CDR2
VIWYVGSNKYYADSVKG

SEQ ID NO: 201 - protein, 14 aa, Artificial Sequence
  33F6 heavy chain CDR3
GGELRLYYYYGMDV

SEQ ID NO: 202 - protein, 11 aa, Artificial Sequence
  33F6 light chain CDR1
RASQGIRNDLG

SEQ ID NO: 203 - protein, 7 aa, Artificial Sequence
  33F6 light chain CDR2
AASSLQS

SEQ ID NO: 204 - protein, 9 aa, Artificial Sequence
  33F6 light chain CDR3
LQLNSYPWT

SEQ ID NO: 205 - protein, 453 aa, Artificial Sequence
  34G4 heavy chain
QVQLVESGGGVVQPGRSLRLSCAASGFTFSSYGMHWVRQAPGKGLEWVAVIWYEGSNKYYADSVKGRFTISRDNSKNTLYLQMNSLRAEDTAVYYCARGGQLGYYYYYGMDVWGQGTTVTVSSASTKGPSVFPLAPSSKSTSGGTAALGCLVKDYFPEPVTVSWNSGALTSGVHTFPAVLQSSGLYSLSSVVTVPSSSLGTQTYICNVNHKPSNTKVDKKVEPKSCDKTHTCPPCPAPELLGGPSVFLFPPKPKDTLMISRTPEVTCVVVDVSHEDPEVKFNWYVDGVEVHNAKTKPREEQYNSTYRVVSVLTVLHQDWLNGKEYKCKVSNKALPAPIEKTISKAKGQPREPQVYTLPPSREEMTKNQVSLTCLVKGFYPSDIAVEWESNGQPENNYKTTPPVLDSDGSFFLYSKLTVDKSRWQQGNVFSCSVMHEALHNHYTQKSLSLSPGK

SEQ ID NO: 206 - protein, 214 aa, Artificial Sequence
  34G4 light chain
DIQMTQSPSSLSASVGDRVTITCRASQGIRNDLGWYQQKPGKAPKRLIYDASSLQSGVPSRFSGSGSGTDFTLTISSLQPEDFATYYCLQLNSYPWTFGQGTKVEIKRTVAAPSVFIFPPSDEQLKSGTASVVCLLNNFYPREAKVQWKVDNALQSGNSQESVTEQDSKDSTYSLSSTLTLSKADYEKHKVYACEVTHQGLSSPVTKSFNRGEC

SEQ ID NO: 207 - protein, 123 aa, Artificial Sequence
  34G4 variable heavy chain
QVQLVESGGGVVQPGRSLRLSCAASGFTFSSYGMHWVRQAPGKGLEWVAVIWYEGSNKYYADSVKGRFTISRDNSKNTLYLQMNSLRAEDTAVYYCARGGQLGYYYYYGMDVWGQGTTVTVSS

SEQ ID NO: 208 - protein, 108 aa, Artificial Sequence
  34G4 variable light chain
DIQMTQSPSSLSASVGDRVTITCRASQGIRNDLGWYQQKPGKAPKRLIYDASSLQSGVPSRFSGSGSGTDFTLTISSLQPEDFATYYCLQLNSYPWTFGQGTKVEIKR

SEQ ID NO: 209 - protein, 5 aa, Artificial Sequence
  34G4 heavy chain CDR1
SYGMH

SEQ ID NO: 210 - protein, 17 aa, Artificial Sequence
  34G4 heavy chain CDR2
VIWYEGSNKYYADSVKG

SEQ ID NO: 211 - protein, 14 aa, Artificial Sequence
  34G4 heavy chain CDR3
GGQLGYYYYYGMDV

SEQ ID NO: 212 - protein, 11 aa, Artificial Sequence
  34G4 light chain CDR1
RASQGIRNDLG

SEQ ID NO: 213 - protein, 7 aa, Artificial Sequence
  34G4 light chain CDR2
DASSLQS

SEQ ID NO: 214 - protein, 9 aa, Artificial Sequence
  34G4 light chain CDR3
LQLNSYPWT

SEQ ID NO: 215 - protein, 453 aa, Artificial Sequence
  35B10 heavy chain
QVQLVESGGGVVQPGRSLRLSCAASGFTFSSYGMHWVRQAPGKGLEWVAVIWYAGSNKYYADSVKGRFTISRDNSKNTLYLQMNSLRAEDTAVYYCARGGELSFYYYYGMDVWGQGTTVTVSSASTKGPSVFPLAPSSKSTSGGTAALGCLVKDYFPEPVTVSWNSGALTSGVHTFPAVLQSSGLYSLSSVVTVPSSSLGTQTYICNVNHKPSNTKVDKKVEPKSCDKTHTCPPCPAPELLGGPSVFLFPPKPKDTLMISRTPEVTCVVVDVSHEDPEVKFNWYVDGVEVHNAKTKPREEQYNSTYRVVSVLTVLHQDWLNGKEYKCKVSNKALPAPIEKTISKAKGQPREPQVYTLPPSREEMTKNQVSLTCLVKGFYPSDIAVEWESNGQPENNYKTTPPVLDSDGSFFLYSKLTVDKSRWQQGNVFSCSVMHEALHNHYTQKSLSLSPGK

SEQ ID NO: 216 - protein, 214 aa, Artificial Sequence
  35B10 light chain
DIQMTQSPSSLSASVGDRVTITCRASQGIRNDLGWYQQKPGKAPKRLIYAASTLQSGVPSRFSGSGSGTEFTLTISSLQPEDFATYYCLQHNNYPWTFGQGTKVEIKRTVAAPSVFIFPPSDEQLKSGTASVVCLLNNFYPREAKVQWKVDNALQSGNSQESVTEQDSKDSTYSLSSTLTLSKADYEKHKVYACEVTHQGLSSPVTKSFNRGEC

SEQ ID NO: 217 - protein, 123 aa, Artificial Sequence
  35B10 variable heavy chain
QVQLVESGGGVVQPGRSLRLSCAASGFTFSSYGMHWVRQAPGKGLEWVAVIWYAGSNKYYADSVKGRFTISRDNSKNTLYLQMNSLRAEDTAVYYCARGGELSFYYYYGMDVWGQGTTVTVSS

SEQ ID NO: 218 - protein, 108 aa, Artificial Sequence
  35B10 variable light chain
DIQMTQSPSSLSASVGDRVTITCRASQGIRNDLGWYQQKPGKAPKRLIYAASTLQSGVPSRFSGSGSGTEFTLTISSLQPEDFATYYCLQHNNYPWTFGQGTKVEIKR

SEQ ID NO: 219 - protein, 5 aa, Artificial Sequence
  35B10 heavy chain CDR1
SYGMH

SEQ ID NO: 220 - protein, 17 aa, Artificial Sequence
  35B10 heavy chain CDR2
VIWYAGSNKYYADSVKG

SEQ ID NO: 221 - protein, 14 aa, Artificial Sequence
  35B10 heavy chain CDR3
GGELSFYYYYGMDV

SEQ ID NO: 222 - protein, 11 aa, Artificial Sequence
  35B10 light chain CDR1
RASQGIRNDLG

SEQ ID NO: 223 - protein, 7 aa, Artificial Sequence
  35B10 light chain CDR2
AASTLQS

SEQ ID NO: 224 - protein, 9 aa, Artificial Sequence
  35B10 light chain CDR3
LQHNNYPWT

SEQ ID NO: 225 - protein, 453 aa, Artificial Sequence
  41E11 heavy chain
QVQVVESGGGVVQPGRSLRLSCAASGFTFSSYGMYWVRQAPGKGLEWVAVIWYEGSNKYYADSVRGRFTISRDNSKNTLYLQMNSLRAEDTALYYCARGGQLGKDYYSGMDVWGQGTTVTVSSASTKGPSVFPLAPSSKSTSGGTAALGCLVKDYFPEPVTVSWNSGALTSGVHTFPAVLQSSGLYSLSSVVTVPSSSLGTQTYICNVNHKPSNTKVDKKVEPKSCDKTHTCPPCPAPELLGGPSVFLFPPKPKDTLMISRTPEVTCVVVDVSHEDPEVKFNWYVDGVEVHNAKTKPREEQYNSTYRVVSVLTVLHQDWLNGKEYKCKVSNKALPAPIEKTISKAKGQPREPQVYTLPPSREEMTKNQVSLTCLVKGFYPSDIAVEWESNGQPENNYKTTPPVLDSDGSFFLYSKLTVDKSRWQQGNVFSCSVMHEALHNHYTQKSLSLSPGK

SEQ ID NO: 226 - protein, 214 aa, Artificial Sequence
  41E11 light chain
DIQMTQSPSSLSASVGDRVTITCRASQVIRNDLGWYQQKPGKAPKRLIYAASSLQSGVPSRFSGSGSGTEFTLTISSLQPEDFATYYCLQHNSYPLTFGGGTKVEIKRTVAAPSVFIFPPSDEQLKSGTASVVCLLNNFYPREAKVQWKVDNALQSGNSQESVTEQDSKDSTYSLSSTLTLSKADYEKHKVYACEVTHQGLSSPVTKSFNRGEC

SEQ ID NO: 227 - protein, 123 aa, Artificial Sequence
  41E11 variable heavy chain
QVQVVESGGGVVQPGRSLRLSCAASGFTFSSYGMYWVRQAPGKGLEWVAVIWYEGSNKYYADSVRGRFTISRDNSKNTLYLQMNSLRAEDTALYYCARGGQLGKDYYSGMDVWGQGTTVTVSS

SEQ ID NO: 228 - protein, 108 aa, Artificial Sequence
  41E11 variable light chain
DIQMTQSPSSLSASVGDRVTITCRASQVIRNDLGWYQQKPGKAPKRLIYAASSLQSGVPSRFSGSGSGTEFTLTISSLQPEDFATYYCLQHNSYPLTFGGGTKVEIKR

SEQ ID NO: 229 - protein, 5 aa, Artificial Sequence
  41E11 heavy chain CDR1
SYGMY

SEQ ID NO: 230 - protein, 17 aa, Artificial Sequence
  41E11 heavy chain CDR2
VIWYEGSNKYYADSVRG

SEQ ID NO: 231 - protein, 14 aa, Artificial Sequence
  41E11 heavy chain CDR3
GGQLGKDYYSGMDV

SEQ ID NO: 232 - protein, 11 aa, Artificial Sequence
  41E11 light chain CDR1
RASQVIRNDLG

SEQ ID NO: 233 - protein, 7 aa, Artificial Sequence
  41E11 light chain CDR2
AASSLQS

SEQ ID NO: 234 - protein, 9 aa, Artificial Sequence
  41E11 light chain CDR3
LQHNSYPLT

SEQ ID NO: 235 - protein, 453 aa, Artificial Sequence
  41G5 heavy chain
QVQLVESGGGVVQPGRSLRLSCAASGFTFSSYGMHWVRQAPGKGLEWVAVIWYPGSNKYYADSVKGRFTISRDNSKNTLYLQMNSLRAEDTAVYYCARGGELGRYYYYGMDVWGQGTTVTVSSASTKGPSVFPLAPSSKSTSGGTAALGCLVKDYFPEPVTVSWNSGALTSGVHTFPAVLQSSGLYSLSSVVTVPSSSLGTQTYICNVNHKPSNTKVDKKVEPKSCDKTHTCPPCPAPELLGGPSVFLFPPKPKDTLMISRTPEVTCVVVDVSHEDPEVKFNWYVDGVEVHNAKTKPREEQYNSTYRVVSVLTVLHQDWLNGKEYKCKVSNKALPAPIEKTISKAKGQPREPQVYTLPPSREEMTKNQVSLTCLVKGFYPSDIAVEWESNGQPENNYKTTPPVLDSDGSFFLYSKLTVDKSRWQQGNVFSCSVMHEALHNHYTQKSLSLSPGK

SEQ ID NO: 236 - protein, 214 aa, Artificial Sequence
  41G5 light chain
DIQMTQSPSSLSASVGDRVTVTCRASQGIRNDLGWYQQKPGKAPKRLIYAASSLQSGVPSRFSGSGSGTEFTLTISSLQPEDFATYYCLQHNNYPWTFGQGTKVDIKRTVAAPSVFIFPPSDEQLKSGTASVVCLLNNFYPREAKVQWKVDNALQSGNSQESVTEQDSKDSTYSLSSTLTLSKADYEKHKVYACEVTHQGLSSPVTKSFNRGEC

SEQ ID NO: 237 - protein, 123 aa, Artificial Sequence
  41G5 variable heavy chain
QVQLVESGGGVVQPGRSLRLSCAASGFTFSSYGMHWVRQAPGKGLEWVAVIWYPGSNKYYADSVKGRFTISRDNSKNTLYLQMNSLRAEDTAVYYCARGGELGRYYYYGMDVWGQGTTVTVSS

SEQ ID NO: 238 - protein, 108 aa, Artificial Sequence
  41G5 variable light chain
DIQMTQSPSSLSASVGDRVTVTCRASQGIRNDLGWYQQKPGKAPKRLIYAASSLQSGVPSRFSGSGSGTEFTLTISSLQPEDFATYYCLQHNNYPWTFGQGTKVDIKR

SEQ ID NO: 239 - protein, 5 aa, Artificial Sequence
  41G5 heavy chain CDR1
SYGMH

SEQ ID NO: 240 - protein, 17 aa, Artificial Sequence
  41G5 heavy chain CDR2
VIWYPGSNKYYADSVKG

SEQ ID NO: 241 - protein, 14 aa, Artificial Sequence
  41G5 heavy chain CDR3
GGELGRYYYYGMDV

SEQ ID NO: 242 - protein, 11 aa, Artificial Sequence
  41G5 light chain CDR1
RASQGIRNDLG

SEQ ID NO: 243 - protein, 7 aa, Artificial Sequence
  41G5 light chain CDR2
AASSLQS

SEQ ID NO: 244 - protein, 9 aa, Artificial Sequence
  41G5 light chain CDR3
LQHNNYPWT

SEQ ID NO: 245 - protein, 453 aa, Artificial Sequence
  42A11 heavy chain
QVQLVESGGGVVQPGRSLRLSCAASGFTFSSYGMHWVRQAPGKGLEWVAVIWYEGSNKYYADSVKGRFTISRDNSKNTLYLQMNSLRAEDTAVYYCARGGQLGYYYYSGMDVWGQGTTVTVSSASTKGPSVFPLAPSSKSTSGGTAALGCLVKDYFPEPVTVSWNSGALTSGVHTFPAVLQSSGLYSLSSVVTVPSSSLGTQTYICNVNHKPSNTKVDKKVEPKSCDKTHTCPPCPAPELLGGPSVFLFPPKPKDTLMISRTPEVTCVVVDVSHEDPEVKFNWYVDGVEVHNAKTKPREEQYNSTYRVVSVLTVLHQDWLNGKEYKCKVSNKALPAPIEKTISKAKGQPREPQVYTLPPSREEMTKNQVSLTCLVKGFYPSDIAVEWESNGQPENNYKTTPPVLDSDGSFFLYSKLTVDKSRWQQGNVFSCSVMHEALHNHYTQKSLSLSPGK

SEQ ID NO: 246 - protein, 214 aa, Artificial Sequence
  42A11 light chain
DIQMTQSPSSLSASVGDRVTITCRASQGIRNDLGWYQQKPGKAPKRLIYDASSLQSGVPSRFSGSGSGTDFTLTISSLQPEEFATYYCLQHNNYPWTFGQGTKVEIKRTVAAPSVFIFPPSDEQLKSGTASVVCLLNNFYPREAKVQWKVDNALQSGNSQESVTEQDSKDSTYSLSSTLTLSKADYEKHKVYACEVTHQGLSSPVTKSFNRGEC

SEQ ID NO: 247 - protein, 123 aa, Artificial Sequence
  42A11 variable heavy chain
QVQLVESGGGVVQPGRSLRLSCAASGFTFSSYGMHWVRQAPGKGLEWVAVIWYEGSNKYYADSVKGRFTISRDNSKNTLYLQMNSLRAEDTAVYYCARGGQLGYYYYSGMDVWGQGTTVTVSS

SEQ ID NO: 248 - protein, 108 aa, Artificial Sequence
  42A11 variable light chain
DIQMTQSPSSLSASVGDRVTITCRASQGIRNDLGWYQQKPGKAPKRLIYDASSLQSGVPSRFSGSGSGTDFTLTISSLQPEEFATYYCLQHNNYPWTFGQGTKVEIKR

SEQ ID NO: 249 - protein, 5 aa, Artificial Sequence
  42A11 heavy chain CDR1
SYGMH

SEQ ID NO: 250 - protein, 17 aa, Artificial Sequence
  42A11 heavy chain CDR2
VIWYEGSNKYYADSVKG

SEQ ID NO: 251 - protein, 14 aa, Artificial Sequence
  42A11 heavy chain CDR3
GGQLGYYYYSGMDV

SEQ ID NO: 252 - protein, 11 aa, Artificial Sequence
  42A11 light chain CDR1
RASQGIRNDLG

SEQ ID NO: 253 - protein, 7 aa, Artificial Sequence
  42A11 light chain CDR2
DASSLQS

SEQ ID NO: 254 - protein, 9 aa, Artificial Sequence
  42A11 light chain CDR3
LQHNNYPWT

SEQ ID NO: 255 - protein, 450 aa, Artificial Sequence
  44C1 heavy chain
QVQLVESGGGVVQPGRSLRLSCAASGFTLSSYGMHWVRQAPGKGLEWVAVIWYDGSNKYYADSVKGRFTISRDNSKNTLYLQMNSLRAEDTAVYYCARRGTVTTPDFDYWGQGTLVTVSSASTKGPSVFPLAPSSKSTSGGTAALGCLVKDYFPEPVTVSWNSGALTSGVHTFPAVLQSSGLYSLSSVVTVPSSSLGTQTYICNVNHKPSNTKVDKKVEPKSCDKTHTCPPCPAPELLGGPSVFLFPPKPKDTLMISRTPEVTCVVVDVSHEDPEVKFNWYVDGVEVHNAKTKPREEQYNSTYRVVSVLTVLHQDWLNGKEYKCKVSNKALPAPIEKTISKAKGQPREPQVYTLPPSREEMTKNQVSLTCLVKGFYPSDIAVEWESNGQPENNYKTTPPVLDSDGSFFLYSKLTVDKSRWQQGNVFSCSVMHEALHNHYTQKSLSLSPGK

SEQ ID NO: 256 - protein, 216 aa, Artificial Sequence
  44C1 light chain
QSALTQPASVSGSPGQSITISCTGTSSDVGTYNLVSWYQQHPGKAPKLMIYEVSKRPSGVSNRFSGSKSGNTASLTISGLQAEDEADYYCCSYAGFSTWVFGGGTKLTVLGQPKAAPSVTLFPPSSEELQANKATLVCLISDFYPGAVTVAWKADSSPVKAGVETTTPSKQSNNKYAASSYLSLTPEQWKSHRSYSCQVTHEGSTVEKTVAPTECS

SEQ ID NO: 257 - protein, 120 aa, Artificial Sequence
  44C1 variable heavy chain
QVQLVESGGGVVQPGRSLRLSCAASGFTLSSYGMHWVRQAPGKGLEWVAVIWYDGSNKYYADSVKGRFTISRDNSKNTLYLQMNSLRAEDTAVYYCARRGTVTTPDFDYWGQGTLVTVSS

SEQ ID NO: 258 - protein, 111 aa, Artificial Sequence
  44C1 variable light chain
QSALTQPASVSGSPGQSITISCTGTSSDVGTYNLVSWYQQHPGKAPKLMIYEVSKRPSGVSNRFSGSKSGNTASLTISGLQAEDEADYYCCSYAGFSTWVFGGGTKLTVLG

SEQ ID NO: 259 - protein, 5 aa, Artificial Sequence
  44C1 heavy chain CDR1
SYGMH

SEQ ID NO: 260 - protein, 17 aa, Artificial Sequence
  44C1 heavy chain CDR2
VIWYDGSNKYYADSVKG

SEQ ID NO: 261 - protein, 11 aa, Artificial Sequence
  44C1 heavy chain CDR3
RGTVTTPDFDY

SEQ ID NO: 262 - protein, 14 aa, Artificial Sequence
  44C1 light chain CDR1
TGTSSDVGTYNLVS

SEQ ID NO: 263 - protein, 7 aa, Artificial Sequence
  44C1 light chain CDR2
EVSKRPS

SEQ ID NO: 264 - protein, 10 aa, Artificial Sequence
  44C1 light chain CDR3
CSYAGFSTWV

SEQ ID NO: 265 - protein, 447 aa, Artificial Sequence
  45A8 heavy chain
QVQLVESGGGVVQPGRSLRLSCAASGFTFSSYGMHWVRQAPGKGLEWVAVIWHDGSNKYYADSVKGRFTISKDNSKNTLYLQMNSLRAEDTAVYYCAREYGGNFDYWGQGTLVTVSSASTKGPSVFPLAPSSKSTSGGTAALGCLVKDYFPEPVTVSWNSGALTSGVHTFPAVLQSSGLYSLSSVVTVPSSSLGTQTYICNVNHKPSNTKVDKKVEPKSCDKTHTCPPCPAPELLGGPSVFLFPPKPKDTLMISRTPEVTCVVVDVSHEDPEVKFNWYVDGVEVHNAKTKPREEQYNSTYRVVSVLTVLHQDWLNGKEYKCKVSNKALPAPIEKTISKAKGQPREPQVYTLPPSREEMTKNQVSLTCLVKGFYPSDIAVEWESNGQPENNYKTTPPVLDSDGSFFLYSKLTVDKSRWQQGNVFSCSVMHEALHNHYTQKSLSLSPGK

SEQ ID NO: 266 - protein, 216 aa, Artificial Sequence
  45A8 light chain
QSALTQPASVSGSPGQSITISCTGTSSDVGTYNLVSWYQQHPGKAPKLMIYEVSKRPSGISNRFSGSKSGNTASLTISGLQAEDEADYYCCSYAGYSTWVFGGGTKLTVLRQPKAAPSVTLFPPSSEELQANKATLVCLISDFYPGAVTVAWKADSSPVKAGVETTTPSKQSNNKYAASSYLSLTPEQWKSHRSYSCQVTHEGSTVEKTVAPTECS

SEQ ID NO: 267 - protein, 117 aa, Artificial Sequence
  45A8 variable heavy chain
QVQLVESGGGVVQPGRSLRLSCAASGFTFSSYGMHWVRQAPGKGLEWVAVIWHDGSNKYYADSVKGRFTISKDNSKNTLYLQMNSLRAEDTAVYYCAREYGGNFDYWGQGTLVTVSS

SEQ ID NO: 268 - protein, 111 aa, Artificial Sequence
  45A8 variable light chain
QSALTQPASVSGSPGQSITISCTGTSSDVGTYNLVSWYQQHPGKAPKLMIYEVSKRPSGISNRFSGSKSGNTASLTISGLQAEDEADYYCCSYAGYSTWVFGGGTKLTVLR

SEQ ID NO: 269 - protein, 5 aa, Artificial Sequence
  45A8 heavy chain CDR1
SYGMH

SEQ ID NO: 270 - protein, 17 aa, Artificial Sequence
  45A8 heavy chain CDR2
VIWHDGSNKYYADSVKG

SEQ ID NO: 271 - protein, 8 aa, Artificial Sequence
  45A8 heavy chain CDR3
EYGGNFDY

SEQ ID NO: 272 - protein, 14 aa, Artificial Sequence
  45A8 light chain CDR1
TGTSSDVGTYNLVS

SEQ ID NO: 273 - protein, 7 aa, Artificial Sequence
  45A8 light chain CDR2
EVSKRPS

SEQ ID NO: 274 - protein, 10 aa, Artificial Sequence
  45A8 light chain CDR3
CSYAGYSTWV

SEQ ID NO: 275 - protein, 454 aa, Artificial Sequence
  46E11 heavy chain
QVQLVESGGGVVQPGRSLRLSCAASGFTFSSYGMHWVRQAPGKGLEWVAVIWYAGSNKYYADSVKGRFTISRDNSKNTLYLQMNSLRAEDTAVYYCARGDILTGYSLYYGMDVWGQGTTVTVSSASTKGPSVFPLAPSSKSTSGGTAALGCLVKDYFPEPVTVSWNSGALTSGVHTFPAVLQSSGLYSLSSVVTVPSSSLGTQTYICNVNHKPSNTKVDKKVEPKSCDKTHTCPPCPAPELLGGPSVFLFPPKPKDTLMISRTPEVTCVVVDVSHEDPEVKFNWYVDGVEVHNAKTKPREEQYNSTYRVVSVLTVLHQDWLNGKEYKCKVSNKALPAPIEKTISKAKGQPREPQVYTLPPSREEMTKNQVSLTCLVKGFYPSDIAVEWESNGQPENNYKTTPPVLDSDGSFFLYSKLTVDKSRWQQGNVFSCSVMHEALHNHYTQKSLSLSPGK

SEQ ID NO: 276 - protein, 214 aa, Artificial Sequence
  46E11 light chain
DIQMTQSPSSLSASVGDRVTITCRASQGIRNDLGWYQQKPGKAPKRLIYAASSLQSGVPSRFSGSGSGAEFTLTISSLQPEDFATYYCLQHNSYPWTFGQGTKVEIKRTVAAPSVFIFPPSDEQLKSGTASVVCLLNNFYPREAKVQWKVDNALQSGNSQESVTEQDSKDSTYSLSSTLTLSKADYEKHKVYACEVTHQGLSSPVTKSFNRGEC

SEQ ID NO: 277 - protein, 124 aa, Artificial Sequence
  46E11 variable heavy chain
QVQLVESGGGVVQPGRSLRLSCAASGFTFSSYGMHWVRQAPGKGLEWVAVIWYAGSNKYYADSVKGRFTISRDNSKNTLYLQMNSLRAEDTAVYYCARGDILTGYSLYYGMDVWGQGTTVTVSS

SEQ ID NO: 278 - protein, 108 aa, Artificial Sequence
  46E11 variable heavy chain
DIQMTQSPSSLSASVGDRVTITCRASQGIRNDLGWYQQKPGKAPKRLIYAASSLQSGVPSRFSGSGSGAEFTLTISSLQPEDFATYYCLQHNSYPWTFGQGTKVEIKR

SEQ ID NO: 279 - protein, 5 aa, Artificial Sequence
  46E11 heavy chain CDR1
SYGMH

SEQ ID NO: 280 - protein, 17 aa, Artificial Sequence
  46E11 heavy chain CDR2
VIWYAGSNKYYADSVKG

SEQ ID NO: 281 - protein, 15 aa, Artificial Sequence
  46E11 heavy chain CDR3
GDILTGYSLYYGMDV

SEQ ID NO: 282 - protein, 11 aa, Artificial Sequence
  46E11 light chain CDR1
RASQGIRNDLG

SEQ ID NO: 283 - protein, 7 aa, Artificial Sequence
  46E11 light chain CDR2
AASSLQS

SEQ ID NO: 284 - protein, 9 aa, Artificial Sequence
  46E11 light chain CDR3
LQHNSYPWT

SEQ ID NO: 285 - protein, 453 aa, Artificial Sequence
  48H12 heavy chain
QVQLVESGGGVVQPGRSLRLSCAASGFTFSSYGMHWVRQAPGKGLEWVAVIWYAGSNKYYADSVKGRFTISRDNSKNTVYLQMNSLRAEDTAVYYCARGGQLALYYYYGMDVWGQGTTVTVSSASTKGPSVFPLAPSSKSTSGGTAALGCLVKDYFPEPVTVSWNSGALTSGVHTFPAVLQSSGLYSLSSVVTVPSSSLGTQTYICNVNHKPSNTKVDKKVEPKSCDKTHTCPPCPAPELLGGPSVFLFPPKPKDTLMISRTPEVTCVVVDVSHEDPEVKFNWYVDGVEVHNAKTKPREEQYNSTYRVVSVLTVLHQDWLNGKEYKCKVSNKALPAPIEKTISKAKGQPREPQVYTLPPSREEMTKNQVSLTCLVKGFYPSDIAVEWESNGQPENNYKTTPPVLDSDGSFFLYSKLTVDKSRWQQGNVFSCSVMHEALHNHYTQKSLSLSPGK

SEQ ID NO: 286 - protein, 214 aa, Artificial Sequence
  48H12 light chain
DIQMTQSPSSLSASVGDRVTITCRASQGIRNDLGWYQQKPGKAPKRLIYAASSLQSGVPSRFSGSGSGTEFTLTISSLQPEDFATYYCLQHNNYPWTFGQGTKVEIKRTVAAPSVFIFPPSDEQLKSGTASVVCLLNNFYPREAKVQWKVDNALQSGNSQESVTEQDSKDSTYSLSSTLTLSKADYEKHKVYACEVTHQGLSSPVTKSFNRGEC

SEQ ID NO: 287 - protein, 123 aa, Artificial Sequence
  48H12 variable heavy chain
QVQLVESGGGVVQPGRSLRLSCAASGFTFSSYGMHWVRQAPGKGLEWVAVIWYAGSNKYYADSVKGRFTISRDNSKNTVYLQMNSLRAEDTAVYYCARGGQLALYYYYGMDVWGQGTTVTVSS

SEQ ID NO: 288 - protein, 108 aa, Artificial Sequence
  48H12 variable light chain
DIQMTQSPSSLSASVGDRVTITCRASQGIRNDLGWYQQKPGKAPKRLIYAASSLQSGVPSRFSGSGSGTEFTLTISSLQPEDFATYYCLQHNNYPWTFGQGTKVEIKR

SEQ ID NO: 289 - protein, 5 aa, Artificial Sequence
  48H12 heavy chain CDR1
SYGMH

SEQ ID NO: 290 - protein, 17 aa, Artificial Sequence
  48H12 heavy chain CDR2
VIWYAGSNKYYADSVKG

SEQ ID NO: 291 - protein, 14 aa, Artificial Sequence
  48H12 heavy chain CDR3
GGQLALYYYYGMDV

SEQ ID NO: 292 - protein, 11 aa, Artificial Sequence
  48H12 light chain CDR1
RASQGIRNDLG

SEQ ID NO: 293 - protein, 7 aa, Artificial Sequence
  48H12 light chain CDR2
AASSLQS

SEQ ID NO: 294 - protein, 9 aa, Artificial Sequence
  48H12 light chain CDR3
LQHNNYPWT

SEQ ID NO: 295 - protein, 453 aa, Artificial Sequence
  48H7 heavy chain
QVQLVESGGGVVQPGRSLRLSCAASGFTFSSYGMYWVRQAPGKGLEWVAVIWYEGSNKYYADSVKGRFTISRDNSKNTLYLQMNSLRAEDTAVYFCARGGELGRDYYSGMDVWGQGTTVTVSSASTKGPSVFPLAPSSKSTSGGTAALGCLVKDYFPEPVTVSWNSGALTSGVHTFPAVLQSSGLYSLSSVVTVPSSSLGTQTYICNVNHKPSNTKVDKKVEPKSCDKTHTCPPCPAPELLGGPSVFLFPPKPKDTLMISRTPEVTCVVVDVSHEDPEVKFNWYVDGVEVHNAKTKPREEQYNSTYRVVSVLTVLHQDWLNGKEYKCKVSNKALPAPIEKTISKAKGQPREPQVYTLPPSREEMTKNQVSLTCLVKGFYPSDIAVEWESNGQPENNYKTTPPVLDSDGSFFLYSKLTVDKSRWQQGNVFSCSVMHEALHNHYTQKSLSLSPGK

SEQ ID NO: 296 - protein, 214 aa, Artificial Sequence
  48H7 light chain
DIQMTQSPSSLSASVGDRVTITCRASQVIRNDLGWYQQKPGKAPKRLIYAASSLQSGVPSRFSGSGSGTEFTLTISSLQPEDFATYYCLQHNSYPITFGGGTKVEIKRTVAAPSVFIFPPSDEQLKSGTASVVCLLNNFYPREAKVQWKVDNALQSGNSQESVTEQDSKDSTYSLSSTLTLSKADYEKHKVYACEVTHQGLSSPVTKSFNRGEC

SEQ ID NO: 297 - protein, 123 aa, Artificial Sequence
  48H7 variable heavy chain
QVQLVESGGGVVQPGRSLRLSCAASGFTFSSYGMYWVRQAPGKGLEWVAVIWYEGSNKYYADSVKGRFTISRDNSKNTLYLQMNSLRAEDTAVYFCARGGELGRDYYSGMDVWGQGTTVTVSS

SEQ ID NO: 298 - protein, 108 aa, Artificial Sequence
  48H7 variable light chain
DIQMTQSPSSLSASVGDRVTITCRASQVIRNDLGWYQQKPGKAPKRLIYAASSLQSGVPSRFSGSGSGTEFTLTISSLQPEDFATYYCLQHNSYPITFGGGTKVEIKR

SEQ ID NO: 299 - protein, 5 aa, Artificial Sequence
  48H7 heavy chain CDR1
SYGMY

SEQ ID NO: 300 - protein, 17 aa, Artificial Sequence
  48H7 heavy chain CDR2
VIWYEGSNKYYADSVKG

SEQ ID NO: 301 - protein, 14 aa, Artificial Sequence
  48H7 heavy chain CDR3
GGELGRDYYSGMDV

SEQ ID NO: 302 - protein, 11 aa, Artificial Sequence
  48H7 light chain CDR1
RASQVIRNDLG

SEQ ID NO: 303 - protein, 7 aa, Artificial Sequence
  48H7 light chain CDR2
AASSLQS

SEQ ID NO: 304 - protein, 9 aa, Artificial Sequence
  48H7 light chain CDR3
LQHNSYPIT

SEQ ID NO: 305 - protein, 453 aa, Artificial Sequence
  49D9 heavy chain
QMQLVESGGGVVQPGRSLRLSCAASGFTFSSYGMHWVRQAPGKGLEWVAVIWYAGSNKYYADSVKGRFTISRDNSKNTLYLQMNSLRAEDTAVYYCARGGRLGFYYYYGMDVWGQGTTVTVSSASTKGPSVFPLAPSSKSTSGGTAALGCLVKDYFPEPVTVSWNSGALTSGVHTFPAVLQSSGLYSLSSVVTVPSSSLGTQTYICNVNHKPSNTKVDKKVEPKSCDKTHTCPPCPAPELLGGPSVFLFPPKPKDTLMISRTPEVTCVVVDVSHEDPEVKFNWYVDGVEVHNAKTKPREEQYNSTYRVVSVLTVLHQDWLNGKEYKCKVSNKALPAPIEKTISKAKGQPREPQVYTLPPSREEMTKNQVSLTCLVKGFYPSDIAVEWESNGQPENNYKTTPPVLDSDGSFFLYSKLTVDKSRWQQGNVFSCSVMHEALHNHYTQKSLSLSPGK

SEQ ID NO: 306 - protein, 214 aa, Artificial Sequence
  49D9 light chain
DIQMTQSPSSLSASVGDRVTITCRASQGIRNDLGWYQQKPGKAPKRLIYAASSLQSGVPSRFSGSGSGTEFTLTISSLQPEDFATYYCLQLNSYPWTFGQGTKVEIKRTVAAPSVFIFPPSDEQLKSGTASVVCLLNNFYPREAKVQWKVDNALQSGNSQESVTEQDSKDSTYSLSSTLTLSKADYEKHKVYACEVTHQGLSSPVTKSFNRGEC

SEQ ID NO: 307 - protein, 123 aa, Artificial Sequence
  49D9 variable heavy chain
QMQLVESGGGVVQPGRSLRLSCAASGFTFSSYGMHWVRQAPGKGLEWVAVIWYAGSNKYYADSVKGRFTISRDNSKNTLYLQMNSLRAEDTAVYYCARGGRLGFYYYYGMDVWGQGTTVTVSS

SEQ ID NO: 308 - protein, 108 aa, Artificial Sequence
  49D9 variable light chain
DIQMTQSPSSLSASVGDRVTITCRASQGIRNDLGWYQQKPGKAPKRLIYAASSLQSGVPSRFSGSGSGTEFTLTISSLQPEDFATYYCLQLNSYPWTFGQGTKVEIKR

SEQ ID NO: 309 - protein, 5 aa, Artificial Sequence
  49D9 heavy chain CDR1
SYGMH

SEQ ID NO: 310 - protein, 17 aa, Artificial Sequence
  49D9 heavy chain CDR2
VIWYAGSNKYYADSVKG

SEQ ID NO: 311 - protein, 14 aa, Artificial Sequence
  49D9 heavy chain CDR3
GGRLGFYYYYGMDV

SEQ ID NO: 312 - protein, 11 aa, Artificial Sequence
  49D9 light chain CDR1
RASQGIRNDLG

SEQ ID NO: 313 - protein, 7 aa, Artificial Sequence
  49D9 light chain CDR2
AASSLQS

SEQ ID NO: 314 - protein, 9 aa, Artificial Sequence
  49D9 light chain CDR3
LQLNSYPWT

SEQ ID NO: 315 - protein, 447 aa, Artificial Sequence
  49E2 heavy chain
QVQLVESGGGVVQPGRSLRLSCAASGFTFSSYGMHWVRQAPGKGLEWVAVIWSDGNNKYYEDSVKGRFTISRDSSKNTLFLQMNSLRAEDTAVYYCARDTATPFDYWGQGTLVTVSSASTKGPSVFPLAPSSKSTSGGTAALGCLVKDYFPEPVTVSWNSGALTSGVHTFPAVLQSSGLYSLSSVVTVPSSSLGTQTYICNVNHKPSNTKVDKKVEPKSCDKTHTCPPCPAPELLGGPSVFLFPPKPKDTLMISRTPEVTCVVVDVSHEDPEVKFNWYVDGVEVHNAKTKPREEQYNSTYRVVSVLTVLHQDWLNGKEYKCKVSNKALPAPIEKTISKAKGQPREPQVYTLPPSREEMTKNQVSLTCLVKGFYPSDIAVEWESNGQPENNYKTTPPVLDSDGSFFLYSKLTVDKSRWQQGNVFSCSVMHEALHNHYTQKSLSLSPGK

SEQ ID NO: 316 - protein, 216 aa, Artificial Sequence
  49E2 light chain
QSALTQPASVSGSPGQSITISCTGTSSDVGIYNLVSWYQQHPGKAPKLMIHEVSKRPSGVSNRFSGSKSGNTASLTISGLQAEDEADYYCCSYAGISTWVFGGGTKLTVLGQPKAAPSVTLFPPSSEELQANKATLVCLISDFYPGAVTVAWKADSSPVKAGVETTTPSKQSNNKYAASSYLSLTPEQWKSHRSYSCQVTHEGSTVEKTVAPTECS

SEQ ID NO: 317 - protein, 117 aa, Artificial Sequence
  49E2 variable heavy chain
QVQLVESGGGVVQPGRSLRLSCAASGFTFSSYGMHWVRQAPGKGLEWVAVIWSDGNNKYYEDSVKGRFTISRDSSKNTLFLQMNSLRAEDTAVYYCARDTATPFDYWGQGTLVTVSS

SEQ ID NO: 318 - protein, 111 aa, Artificial Sequence
  49E2 variable light chain
QSALTQPASVSGSPGQSITISCTGTSSDVGIYNLVSWYQQHPGKAPKLMIHEVSKRPSGVSNRFSGSKSGNTASLTISGLQAEDEADYYCCSYAGISTWVFGGGTKLTVLG

SEQ ID NO: 319 - protein, 5 aa, Artificial Sequence
  49E2 heavy chain CDR1
SYGMH

SEQ ID NO: 320 - protein, 17 aa, Artificial Sequence
  49E2 heavy chain CDR2
VIWSDGNNKYYEDSVKG

SEQ ID NO: 321 - protein, 8 aa, Artificial Sequence
  49E2 heavy chain CDR3
DTATPFDY

SEQ ID NO: 322 - protein, 14 aa, Artificial Sequence
  49E2 light chain CDR1
TGTSSDVGIYNLVS

SEQ ID NO: 323 - protein, 7 aa, Artificial Sequence
  49E2 light chain CDR2
EVSKRPS

SEQ ID NO: 324 - protein, 10 aa, Artificial Sequence
  49E2 light chain CDR3
CSYAGISTWV

SEQ ID NO: 325 - protein, 452 aa, Artificial Sequence
  48A9 heavy chain
QVQLVESGGGVVQPGRSLRLSCAASGFTFSSCGMHWVRQAPGKGLEWVAVISYDGSNKYYADSVKGRFTISRDNSKNTLYLQMNSLRAEDTAVYYCARDLRYNWNDGGVDYWGQGTLVTVSSASTKGPSVFPLAPSSKSTSGGTAALGCLVKDYFPEPVTVSWNSGALTSGVHTFPAVLQSSGLYSLSSVVTVPSSSLGTQTYICNVNHKPSNTKVDKKVEPKSCDKTHTCPPCPAPELLGGPSVFLFPPKPKDTLMISRTPEVTCVVVDVSHEDPEVKFNWYVDGVEVHNAKTKPREEQYNSTYRVVSVLTVLHQDWLNGKEYKCKVSNKALPAPIEKTISKAKGQPREPQVYTLPPSREEMTKNQVSLTCLVKGFYPSDIAVEWESNGQPENNYKTTPPVLDSDGSFFLYSKLTVDKSRWQQGNVFSCSVMHEALHNHYTQKSLSLSPGK

SEQ ID NO: 326 - protein, 214 aa, Artificial Sequence
  48A9 light chain
DIQMTQSPSSLSASVGDRVIITCRASQSISSYLHWYKQKPGKAPKLLIYGASRLQSGVPSRFSGSGSGTDFTLTISSLQPEDFATYYCQQSSSTPLTFGGGTKVEIKRTVAAPSVFIFPPSDEQLKSGTASVVCLLNNFYPREAKVQWKVDNALQSGNSQESVTEQDSKDSTYSLSSTLTLSKADYEKHKVYACEVTHQGLSSPVTKSFNRGEC

SEQ ID NO: 327 - protein, 122 aa, Artificial Sequence
  48A9 variable heavy chain
QVQLVESGGGVVQPGRSLRLSCAASGFTFSSCGMHWVRQAPGKGLEWVAVISYDGSNKYYADSVKGRFTISRDNSKNTLYLQMNSLRAEDTAVYYCARDLRYNWNDGGVDYWGQGTLVTVSS

SEQ ID NO: 328 - protein, 108 aa, Artificial Sequence
  48A9 variable light chain
DIQMTQSPSSLSASVGDRVIITCRASQSISSYLHWYKQKPGKAPKLLIYGASRLQSGVPSRFSGSGSGTDFTLTISSLQPEDFATYYCQQSSSTPLTFGGGTKVEIKR

SEQ ID NO: 329 - protein, 5 aa, Artificial Sequence
  48A9 heavy chain CDR1
SCGMH

SEQ ID NO: 330 - protein, 17 aa, Artificial Sequence
  48A9 heavy chain CDR2
VISYDGSNKYYADSVKG

SEQ ID NO: 331 - protein, 13 aa, Artificial Sequence
  48A9 heavy chain CDR3
DLRYNWNDGGVDY

SEQ ID NO: 332 - protein, 11 aa, Artificial Sequence
  48A9 light chain CDR1
RASQSISSYLH

SEQ ID NO: 333 - protein, 7 aa, Artificial Sequence
  48A9 light chain CDR2
GASRLQS

SEQ ID NO: 334 - protein, 9 aa, Artificial Sequence
  48A9 light chain CDR3
QQSSSTPLT

SEQ ID NO: 335 - protein, 455 aa, Artificial Sequence
  5H7 heavy chain
QVQLQESGPGLVKPSQTLSLTCTVSGGSISSGGYFWSWIRQHPGKGLEWIGYIYYSGTTYYNPSLKSRVTISIDTSKNHFSLKLSSVTAADTAVYYCARDLFYYDSSGPRGFDPWGQGTLVTVSSASTKGPSVFPLAPSSKSTSGGTAALGCLVKDYFPEPVTVSWNSGALTSGVHTFPAVLQSSGLYSLSSVVTVPSSSLGTQTYICNVNHKPSNTKVDKRVEPKSCDKTHTCPPCPAPELLGGPSVFLFPPKPKDTLMISRTPEVTCVVVDVSHEDPEVKFNWYVDGVEVHNAKTKPREEQYNSTYRVVSVLTVLHQDWLNGKEYKCKVSNKALPAPIEKTISKAKGQPREPQVYTLPPSREEMTKNQVSLTCLVKGFYPSDIAVEWESNGQPENNYKTTPPVLDSDGSFFLYSKLTVDKSRWQQGNVFSCSVMHEALHNHYTQKSLSLSPGK

SEQ ID NO: 336 - protein, 215 aa, Artificial Sequence
  5H7 light chain
EIVLTQSPGTLSLSPGERATLSCRASQTVSSNYLAWYQQKPGQAPRLLIYGSSTRATGIPDRFSGSGSGTDFTLTISRLEPEDFAVYYCQQYDSSPWTFGQGTKVEIKRTVAAPSVFIFPPSDEQLKSGTASVVCLLNNFYPREAKVQWKVDNALQSGNSQESVTEQDSKDSTYSLSSTLTLSKADYEKHKVYACEVTHQGLSSPVTKSFNRGEC

SEQ ID NO: 337 - protein, 125 aa, Artificial Sequence
  5H7 variable heavy chain
QVQLQESGPGLVKPSQTLSLTCTVSGGSISSGGYFWSWIRQHPGKGLEWIGYIYYSGTTYYNPSLKSRVTISIDTSKNHFSLKLSSVTAADTAVYYCARDLFYYDSSGPRGFDPWGQGTLVTVSS

SEQ ID NO: 338 - protein, 109 aa, Artificial Sequence
  5H7 variable light chain
EIVLTQSPGTLSLSPGERATLSCRASQTVSSNYLAWYQQKPGQAPRLLIYGSSTRATGIPDRFSGSGSGTDFTLTISRLEPEDFAVYYCQQYDSSPWTFGQGTKVEIKR

SEQ ID NO: 339 - protein, 7 aa, Artificial Sequence
  5H7 heavy chain CDR1
SGGYFWS

SEQ ID NO: 340 - protein, 16 aa, Artificial Sequence
  5H7 heavy chain CDR2
YIYYSGTTYYNPSLKS

SEQ ID NO: 341 - protein, 15 aa, Artificial Sequence
  5H7 heavy chain CDR3
DLFYYDSSGPRGFDP

SEQ ID NO: 342 - protein, 12 aa, Artificial Sequence
  5H7 light chain CDR1
RASQTVSSNYLA

SEQ ID NO: 343 - protein, 7 aa, Artificial Sequence
  5H7 light chain CDR2
GSSTRAT

SEQ ID NO: 344 - protein, 9 aa, Artificial Sequence
  5H7 light chain CDR3
QQYDSSPWT

SEQ ID NO: 345 - protein, 453 aa, Artificial Sequence
  7A10 heavy chain
QVQLVESGGGVVQPGRSLRLSCAASGFTFSSYGMHWVRQAPGKGLEWMAVIWYVGSNKYYADSVKGRFTISRDNSKNTLYLQMNSLSAEDTAVYYCARGGELGRDYYSGMDVWGQGTTVTVSSASTKGPSVFPLAPSSKSTSGGTAALGCLVKDYFPEPVTVSWNSGALTSGVHTFPAVLQSSGLYSLSSVVTVPSSSLGTQTYICNVNHKPSNTKVDKRVEPKSCDKTHTCPPCPAPELLGGPSVFLFPPKPKDTLMISRTPEVTCVVVDVSHEDPEVKFNWYVDGVEVHNAKTKPREEQYNSTYRVVSVLTVLHQDWLNGKEYKCKVSNKALPAPIEKTISKAKGQPREPQVYTLPPSREEMTKNQVSLTCLVKGFYPSDIAVEWESNGQPENNYKTTPPVLDSDGSFFLYSKLTVDKSRWQQGNVFSCSVMHEALHNHYTQKSLSLSPGK

SEQ ID NO: 346 - protein, 214 aa, Artificial Sequence
  7A10 light chain
DIQMTQSPSSLSASVGDRVTITCRASQGIRNDLGWYQQKPGKAPKRLIYAASSLQSGVPSRFSGSGSGTEFTLTISSLQPEDFATYYCQQHNSYPWTFGQGTKVEIKRTVAAPSVFIFPPSDEQLKSGTASVVCLLNNFYPREAKVQWKVDNALQSGNSQESVTEQDSKDSTYSLSSTLTLSKADYEKHKVYACEVTHQGLSSPVTKSFNRGEC

SEQ ID NO: 347 - protein, 123 aa, Artificial Sequence
  7A10 variable heavy chain
QVQLVESGGGVVQPGRSLRLSCAASGFTFSSYGMHWVRQAPGKGLEWMAVIWYVGSNKYYADSVKGRFTISRDNSKNTLYLQMNSLSAEDTAVYYCARGGELGRDYYSGMDVWGQGTTVTVSS

SEQ ID NO: 348 - protein, 108 aa, Artificial Sequence
  7A10 variable light chain
DIQMTQSPSSLSASVGDRVTITCRASQGIRNDLGWYQQKPGKAPKRLIYAASSLQSGVPSRFSGSGSGTEFTLTISSLQPEDFATYYCQQHNSYPWTFGQGTKVEIKR

SEQ ID NO: 349 - protein, 5 aa, Artificial Sequence
  7A10 heavy chain CDR1
SYGMH

SEQ ID NO: 350 - protein, 17 aa, Artificial Sequence
  7A10 heavy chain CDR2
VIWYVGSNKYYADSVKG

SEQ ID NO: 351 - protein, 14 aa, Artificial Sequence
  7A10 heavy chain CDR3
GGELGRDYYSGMDV

SEQ ID NO: 352 - protein, 11 aa, Artificial Sequence
  7A10 light chain CDR1
RASQGIRNDLG

SEQ ID NO: 353 - protein, 7 aa, Artificial Sequence
  7A10 light chain CDR2
AASSLQS

SEQ ID NO: 354 - protein, 9 aa, Artificial Sequence
  7A10 light chain CDR3
QQHNSYPWT

SEQ ID NO: 355 - protein, 453 aa, Artificial Sequence
  9H6 heavy chain
QVQLVESGGGVVQPGRSLRLSCVASGFTFSSYGMHWIRQAPGKGLEWVAVIWYEGSNKYYADSVKGRFTISRDNSKNTLYLQMNSLRAEDTAVYYCARGGRLGKDYYSGMDVWGQGTTVTVSSASTKGPSVFPLAPSSKSTSGGTAALGCLVKDYFPEPVTVSWNSGALTSGVHTFPAVLQSSGLYSLSSVVTVPSSSLGTQTYICNVNHKPSNTKVDKRVEPKSCDKTHTCPPCPAPELLGGPSVFLFPPKPKDTLMISRTPEVTCVVVDVSHEDPEVKFNWYVDGVEVHNAKTKPREEQYNSTYRVVSVLTVLHQDWLNGKEYKCKVSNKALPAPIEKTISKAKGQPREPQVYTLPPSREEMTKNQVSLTCLVKGFYPSDIAVEWESNGQPENNYKTTPPVLDSDGSFFLYSKLTVDKSRWQQGNVFSCSVMHEALHNHYTQKSLSLSPGK

SEQ ID NO: 356 - protein, 214 aa, Artificial Sequence
  9H6 light chain
DIQMTQSPSSLSASVGDRVTITCRASQGIRNDLGWYQQKPGKAPNRLIYATSSLQSGVPSRFSGSGSGTEFTLTISSLQPEDFATYYCLQHNTYPWTFGQGTKVEIKRTVAAPSVFIFPPSDEQLKSGTASVVCLLNNFYPREAKVQWKVDNALQSGNSQESVTEQDSKDSTYSLSSTLTLSKADYEKHKVYACEVTHQGLSSPVTKSFNRGEC

SEQ ID NO: 357 - protein, 123 aa, Artificial Sequence
  9H6 variable heavy chain
QVQLVESGGGVVQPGRSLRLSCVASGFTFSSYGMHWIRQAPGKGLEWVAVIWYEGSNKYYADSVKGRFTISRDNSKNTLYLQMNSLRAEDTAVYYCARGGRLGKDYYSGMDVWGQGTTVTVSS

SEQ ID NO: 358 - protein, 108 aa, Artificial Sequence
  9H6 variable light chain
DIQMTQSPSSLSASVGDRVTITCRASQGIRNDLGWYQQKPGKAPNRLIYATSSLQSGVPSRFSGSGSGTEFTLTISSLQPEDFATYYCLQHNTYPWTFGQGTKVEIKR

SEQ ID NO: 359 - protein, 5 aa, Artificial Sequence
  9H6 heavy chain CDR1
SYGMH

SEQ ID NO: 360 - protein, 17 aa, Artificial Sequence
  9H6 heavy chain CDR2
VIWYEGSNKYYADSVKG

SEQ ID NO: 361 - protein, 14 aa, Artificial Sequence
  9H6 heavy chain CDR3
GGRLGKDYYSGMDV

SEQ ID NO: 362 - protein, 11 aa, Artificial Sequence
  9H6 light chain CDR1
RASQGIRNDLG

SEQ ID NO: 363 - protein, 7 aa, Artificial Sequence
  9H6 light chain CDR2
ATSSLQS

SEQ ID NO: 364 - protein, 9 aa, Artificial Sequence
  9H6 light chain CDR3
LQHNTYPWT

SEQ ID NO: 365 - protein, 451 aa, Artificial Sequence
  rituximab heavy chain
QVQLQQPGAELVKPGASVKMSCKASGYTFTSYNMHWVKQTPGRGLEWIGAIYPGNGDTSYNQKFKGKATLTADKSSSTAYMQLSSLTSEDSAVYYCARSTYYGGDWYFNVWGAGTTVTVSAASTKGPSVFPLAPSSKSTSGGTAALGCLVKDYFPEPVTVSWNSGALTSGVHTFPAVLQSSGLYSLSSVVTVPSSSLGTQTYICNVNHKPSNTKVDKKVEPKSCDKTHTCPPCPAPELLGGPSVFLFPPKPKDTLMISRTPEVTCVVVDVSHEDPEVKFNWYVDGVEVHNAKTKPREEQYNSTYRVVSVLTVLHQDWLNGKEYKCKVSNKALPAPIEKTISKAKGQPREPQVYTLPPSRDELTKNQVSLTCLVKGFYPSDIAVEWESNGQPENNYKTTPPVLDSDGSFFLYSKLTVDKSRWQQGNVFSCSVMHEALHNHYTQKSLSLSPGK

SEQ ID NO: 366 - protein, 213 aa, Artificial Sequence
  rituximab light chain
QIVLSQSPAILSASPGEKVTMTCRASSSVSYIHWFQQKPGSSPKPWIYATSNLASGVPVRFSGSGSGTSYSLTISRVEAEDAATYYCQQWTSNPPTFGGGTKLEIKRTVAAPSVFIFPPSDEQLKSGTASVVCLLNNFYPREAKVQWKVDNALQSGNSQESVTEQDSKDSTYSLSSTLTLSKADYEKHKVYACEVTHQGLSSPVTKSFNRGEC

SEQ ID NO: 367 - protein, 449 aa, Artificial Sequence
  obinutuzumab heavy chain
QVQLVQSGAEVKKPGSSVKVSCKASGYAFSYSWINWVRQAPGQGLEWMGRIFPGDGDTDYNGKFKGRVTITADKSTSTAYMELSSLRSEDTAVYYCARNVFDGYWLVYWGQGTLVTVSSASTKGPSVFPLAPSSKSTSGGTAALGCLVKDYFPEPVTVSWNSGALTSGVHTFPAVLQSSGLYSLSSVVTVPSSSLGTQTYICNVNHKPSNTKVDKKVEPKSCDKTHTCPPCPAPELLGGPSVFLFPPKPKDTLMISRTPEVTCVVVDVSHEDPEVKFNWYVDGVEVHNAKTKPREEQYNSTYRVVSVLTVLHQDWLNGKEYKCKVSNKALPAPIEKTISKAKGQPREPQVYTLPPSRDELTKNQVSLTCLVKGFYPSDIAVEWESNGQPENNYKTTPPVLDSDGSFFLYSKLTVDKSRWQQGNVFSCSVMHEALHNHYTQKSLSLSPGK

SEQ ID NO: 368 - protein, 219 aa, Artificial Sequence
  obinutuzumab light chain
DIVMTQTPLSLPVTPGEPASISCRSSKSLLHSNGITYLYWYLQKPGQSPQLLIYQMSNLVSGVPDRFSGSGSGTDFTLKISRVEAEDVGVYYCAQNLELPYTFGGGTKVEIKRTVAAPSVFIFPPSDEQLKSGTASVVCLLNNFYPREAKVQWKVDNALQSGNSQESVTEQDSKDSTYSLSSTLTLSKADYEKHKVYACEVTHQGLSSPVTKSFNRGEC

SEQ ID NO: 369 - protein, 122 aa, Artificial Sequence
  ofatumumab variable heavy chain
EVQLVESGGGLVQPGRSLRLSCAASGFTFNDYAMHWVRQAPGKGLEWVSTISWNSGSIGYADSVKGRFTISRDNAKKSLYLQMNSLRAEDTALYYCAKDIQYGNYYYGMDVWGQGTTVTVSS

SEQ ID NO: 370 - protein, 107 aa, Artificial Sequence
  ofatumumab variable light chain
EIVLTQSPATLSLSPGERATLSCRASQSVSSYLAWYQQKPGQAPRLLIYDASNRATGIPARFSGSGSGTDFTLTISSLEPEDFAVYYCQQRSNWPITFGQGTRLEIK

SEQ ID NO: 371 - protein, 222 aa, Artificial Sequence
  ofatumumab Fab fragment heavy chain
EVQLVESGGGLVQPGRSLRLSCAASGFTFNDYAMHWVRQAPGKGLEWVSTISWNSGSIGYADSVKGRFTISRDNAKKSLYLQMNSLRAEDTALYYCAKDIQYGNYYYGMDVWGQGTTVTVSSASTKGPSVFPLAPGSSKSTSGTAALGCLVKDYFPEPVTVSWNSGALTSGVHTFPAVLQSSGLYSLSSVVTVPSSSLGTQTYICNVNHKPSNTKVDKKVEP

SEQ ID NO: 372 - protein, 211 aa, Artificial Sequence
  ofatumumab Fab fragment light chain
EIVLTQSPATLSLSPGERATLSCRASQSVSSYLAWYQQKPGQAPRLLIYDASNRATGIPARFSGSGSGTDFTLTISSLEPEDFAVYYCQQRSNWPITFGQGTRLEIKRTVAAPSVFIFPPSDEQLKSGTASVVCLLNNFYPREAKVQWKVDNALQSGNSQESVTEQDSKDSTYSLSSTLTLSKADYEKHKVYACEVTHQGLSSPVTKSFNR

SEQ ID NO: 373 - protein, 451 aa, Artificial Sequence
  veltuzumab heavy chain
QVQLQQSGAEVKKPGSSVKVSCKASGYTFTSYNMHWVKQAPGQGLEWIGAIYPGMGDTSYNQKFKGKATLTADESTNTAYMELSSLRSEDTAFYYCARSTYYGGDWYFDVWGQGTTVTVSSASTKGPSVFPLAPSSKSTSGGTAALGCLVKDYFPEPVTVSWNSGALTSGVHTFPAVLQSSGLYSLSSVVTVPSSSLGTQTYICNVNHKPSNTKVDKRVEPKSCDKTHTCPPCPAPELLGGPSVFLFPPKPKDTLMISRTPEVTCVVVDVSHEDPEVKFNWYVDGVEVHNAKTKPREEQYNSTYRVVSVLTVLHQDWLNGKEYKCKVSNKALPAPIEKTISKAKGQPREPQVYTLPPSREEMTKNQVSLTCLVKGFYPSDIAVEWESNGQPENNYKTTPPVLDSDGSFFLYSKLTVDKSRWQQGNVFSCSVMHEALHNHYTQKSLSLSPGK

SEQ ID NO: 374 - protein, 213 aa, Artificial Sequence
  veltuzumab light chain
DIQLTQSPSSLSASVGDRVTMTCRASSSVSYIHWFQQKPGKAPKPWIYATSNLASGVPVRFSGSGSGTDYTFTISSLQPEDIATYYCQQWTSNPPTFGGGTKLEIKRTVAAPSVFIFPPSDEQLKSGTASVVCLLNNFYPREAKVQWKVDNALQSGNSQESVTEQDSKDSTYSLSSTLTLSKADYEKHKVYACEVTHQGLSSPVTKSFNRGEC

SEQ ID NO: 375 - protein, 447 aa, Artificial Sequence
  tositumomab heavy chain
QAYLQQSGAELVRPGASVKMSCKASGYTFTSYNMHWVKQTPRQGLEWIGAIYPGNGDTSYNQKFKGKATLTVDKSSSTAYMQLSSLTSEDSAVYFCARVVYYSNSYWYFDVWGTGTTVTVSGPSVFPLAPSSKSTSGGTAALGCLVKDYFPEPVTVSWNSGALTSGVHTFPAVLQSSGLYSLSSVVTVPSSSLGTQTYICNVNHKPSNTKVDKKAEPKSCDKTHTCPPCPAPELLGGPSVFLFPPKPKDTLMISRTPEVTCVVVDVSHEDPEVKFNWYVDGVEVHNAKTKPREEQYNSTYRVVSVLTVLHQDWLNGKEYKCKVSNKALPAPIEKTISKAKGQPREPQVYTLPPSRDELTKNQVSLTCLVKGFYPSDIAVEWESNGQPENNYKTTPPVLDSDGSFFLYSKLTVDKSRWQQGNVFSCSVMHEALHNHYTQKSLSLSPGK

SEQ ID NO: 376 - protein, 210 aa, Artificial Sequence
  tositumomab light chain
QIVLSQSPAILSASPGEKVTMTCRASSSVSYMHWYQQKPGSSPKPWIYAPSNLASGVPARFSGSGSGTSYSLTISRVEAEDAATYYCQQWSFNPPTFGAGTKLELKRTVAAPSVFIFPPSDEQLKSGTASVVCLLNNFYPREAKVQWKVDNALQSGNSQESVTEQDSKDSTYSLSSTLTLSKADYEKHKVYACEVTHQGLSSPVTKSFNR

SEQ ID NO: 377 - protein, 443 aa, Artificial Sequence
  ibritumomab heavy chain
QAYLQQSGAELVRPGASVKMSCKASGYTFTSYNMHWVKQTPRQGLEWIGAIYPGNGDTSYNQKFKGKATLTVDKSSSTAYMQLSSLTSEDSAVYFCARVVYYSNSYWYFDVWGTGTTVTVSAPSVYPLAPVCGDTTGSSVTLGCLVKGYFPEPVTLTWNSGSLSSGVHTFPAVLQSDLYTLSSSVTVTSSTWPSQSITCNVAHPASSTKVDKKIEPRGPTIKPCPPCKCPAPNLLGGPSVFIFPPKIKDVLMISLSPIVTCVVVDVSEDDPDVQISWFVNNVEVHTAQTQTHREDYNSTLRVVSALPIQHQDWMSGKEFKCKVNNKDLPAPIERTISKPKGSVRAPQVYVLPPPEEEMTKKQVTLTCMVTDFMPEDIYVEWTNNGKTELNYKNTEPVLDSDGSYFMYSKLRVEKKNWVERNSYSCSVVHEGLHNHHTTKSFSR

SEQ ID NO: 378 - protein, 209 aa, Artificial Sequence
  ibritumomab light chain
QIVLSQSPAILSASPGEKVTMTCRASSSVSYMHWYQQKPGSSPKPWIYAPSNLASGVPARFSGSGSGTSYSLTISRVEAEDAATYYCQQWSFNPPTFGAGTKLELKRADAAPTVFIFPPSDEQLKSGTASVVCLLNNFYPREAKVQWKVDNALQSGNSQESVTEQDSKDSTYSLSSTLTLSKADYEKHKVYACEVTHQGLSSPVTKSFN

SEQ ID NO: 379 - protein, 440 aa, Artificial Sequence
  nivolumab heavy chain
QVQLVESGGGVVQPGRSLRLDCKASGITFSNSGMHWVRQAPGKGLEWVAVIWYDGSKRYYADSVKGRFTISRDNSKNTLFLQMNSLRAEDTAVYYCATNDDYWGQGTLVTVSSASTKGPSVFPLAPCSRSTSESTAALGCLVKDYFPEPVTVSWNSGALTSGVHTFPAVLQSSGLYSLSSVVTVPSSSLGTKTYTCNVDHKPSNTKVDKRVESKYGPPCPPCPAPEFLGGPSVFLFPPKPKDTLMISRTPEVTCVVVDVSQEDPEVQFNWYVDGVEVHNAKTKPREEQFNSTYRVVSVLTVLHQDWLNGKEYKCKVSNKGLPSSIEKTISKAKGQPREPQVYTLPPSQEEMTKNQVSLTCLVKGFYPSDIAVEWESNGQPENNYKTTPPVLDSDGSFFLYSRLTVDKSRWQEGNVFSCSVMHEALHNHYTQKSLSLSLGK

SEQ ID NO: 380 - protein, 214 aa, Artificial Sequence
  nivolumab light chain
EIVLTQSPATLSLSPGERATLSCRASQSVSSYLAWYQQKPGQAPRLLIYDASNRATGIPARFSGSGSGTDFTLTISSLEPEDFAVYYCQQSSNWPRTFGQGTKVEIKRTVAAPSVFIFPPSDEQLKSGTASVVCLLNNFYPREAKVQWKVDNALQSGNSQESVTEQDSKDSTYSLSSTLTLSKADYEKHKVYACEVTHQGLSSPVTKSFNRGEC

SEQ ID NO: 381 - protein, 113 aa, Artificial Sequence [sequence omitted]

SEQ ID NO: 382 - protein, 107 aa, Artificial Sequence [sequence omitted]

SEQ ID NO: 383 - protein, 5 aa, Artificial Sequence
  nivolumab heavy chain CDR1
NSGMH

SEQ ID NO: 384 - protein, 17 aa, Artificial Sequence
  nivolumab heavy chain CDR2
VIWYDGSKRYYADSVKG

SEQ ID NO: 385 - protein, 4 aa, Artificial Sequence
  nivolumab heavy chain CDR3
NDDY

SEQ ID NO: 386 - protein, 11 aa, Artificial Sequence
  nivolumab light chain CDR1
RASQSVSSYLA

SEQ ID NO: 387 - protein, 7 aa, Artificial Sequence
  nivolumab light chain CDR2
DASNRAT

SEQ ID NO: 388 - protein, 9 aa, Artificial Sequence
  nivolumab light chain CDR3
QQSSNWPRT

SEQ ID NO: 389 - protein, 447 aa, Artificial Sequence
  pembrolizumab heavy chain
QVQLVQSGVEVKKPGASVKVSCKASGYTFTNYYMYWVRQAPGQGLEWMGGINPSNGGTNFNEKFKNRVTLTTDSSTTTAYMELKSLQFDDTAVYYCARRDYRFDMGFDYWGQGTTVTVSSASTKGPSVFPLAPCSRSTSESTAALGCLVKDYFPEPVTVSWNSGALTSGVHTFPAVLQSSGLYSLSSVVTVPSSSLGTKTYTCNVDHKPSNTKVDKRVESKYGPPCPPCPAPEFLGGPSVFLFPPKPKDTLMISRTPEVTCVVVDVSQEDPEVQFNWYVDGVEVHNAKTKPREEQFNSTYRVVSVLTVLHQDWLNGKEYKCKVSNKGLPSSIEKTISKAKGQPREPQVYTLPPSQEEMTKNQVSLTCLVKGFYPSDIAVEWESNGQPENNYKTTPPVLDSDGSFFLYSRLTVDKSRWQEGNVFSCSVMHEALHNHYTQKSLSLSLGK

SEQ ID NO: 390 - protein, 218 aa, Artificial Sequence
  pembrolizumab light chain
EIVLTQSPATLSLSPGERATLSCRASKGVSTSGYSYLHWYQQKPGQAPRLLIYLASYLESGVPARFSGSGSGTDFTLTISSLEPEDFAVYYCQHSRDLPLTFGGGTKVEIKRTVAAPSVFIFPPSDEQLKSGTASVVCLLNNFYPREAKVQWKVDNALQSGNSQESVTEQDSKDSTYSLSSTLTLSKADYEKHKVYACEVTHQGLSSPVTKSFNRGEC

SEQ ID NO: 391 - protein, 120 aa, Artificial Sequence [sequence omitted]

SEQ ID NO: 392 - protein, 111 aa, Artificial Sequence [sequence omitted]

SEQ ID NO: 393 - protein, 5 aa, Artificial Sequence
  pembrolizumab heavy chain CDR1
NYYMY

SEQ ID NO: 394 - protein, 16 aa, Artificial Sequence
  pembrolizumab heavy chain CDR2
GINPSNGGTNFNEKFK

SEQ ID NO: 395 - protein, 11 aa, Artificial Sequence
  pembrolizumab heavy chain CDR3
RDYRFDMGFDY

SEQ ID NO: 396 - protein, 15 aa, Artificial Sequence
  pembrolizumab light chain CDR1
RASKGVSTSGYSYLH

SEQ ID NO: 397 - protein, 7 aa, Artificial Sequence
  pembrolizumab light chain CDR2
LASYLES

SEQ ID NO: 398 - protein, 9 aa, Artificial Sequence
  pembrolizumab light chain CDR3
QHSRDLPLT

SEQ ID NO: 399 - protein, 447 aa, Artificial Sequence
  pidilizumab heavy chain
QVQLVQSGSELKKPGASVKISCKASGYTFTNYGMNWVRQAPGQGLQWMGWINTDSGESTYAEEFKGRFVFSLDTSVNTAYLQITSLTAEDTGMYFCVRVGYDALDYWGQGTLVTVSSASTKGPSVFPLAPSSKSTSGGTAALGCLVKDYFPEPVTVSWNSGALTSGVHTFPAVLQSSGLYSLSSVVTVPSSSLGTQTYICNVNHKPSNTKVDKRVEPKSCDKTHTCPPCPAPELLGGPSVFLFPPKPKDTLMISRTPEVTCVVVDVSHEDPEVKFNWYVDGVEVHNAKTKPREEQYNSTYRVVSVLTVLHQDWLNGKEYKCKVSNKALPAPIEKTISKAKGQPREPQVYTLPPSREEMTKNQVSLTCLVKGFYPSDIAVEWESNGQPENNYKTTPPVLDSDGSFFLYSKLTVDKSRWQQGNVFSCSVMHEALHNHYTQKSLSLSPGK

SEQ ID NO: 400 - protein, 213 aa, Artificial Sequence
  pidilizumab light chain
EIVLTQSPSSLSASVGDRVTITCSARSSVSYMHWFQQKPGKAPKLWIYRTSNLASGVPSRFSGSGSGTSYCLTINSLQPEDFATYYCQQRSSFPLTFGGGTKLEIKRTVAAPSVFIFPPSDEQLKSGTASVVCLLNNFYPREAKVQWKVDNALQSGNSQESVTEQDSKDSTYSLSSTLTLSKADYEKHKVYACEVTHQGLSSPVTKSFNRGEC

SEQ ID NO: 401 - protein, 117 aa, Artificial Sequence
  pidilizumab variable heavy chain
QVQLVQSGSELKKPGASVKISCKASGYTFTNYGMNWVRQAPGQGLQWMGWINTDSGESTYAEEFKGRFVFSLDTSVNTAYLQITSLTAEDTGMYFCVRVGYDALDYWGQGTLVTVSS

SEQ ID NO: 402 - protein, 106 aa, Artificial Sequence
  pidilizumab variable light chain
EIVLTQSPSSLSASVGDRVTITCSARSSVSYMHWFQQKPGKAPKLWIYRTSNLASGVPSRFSGSGSGTSYCLTINSLQPEDFATYYCQQRSSFPLTFGGGTKLEIK

SEQ ID NO: 403 - protein, 451 aa, Artificial Sequence
  durvalumab (MEDI4736) heavy chain
EVQLVESGGGLVQPGGSLRLSCAASGFTFSRYWMSWVRQAPGKGLEWVANIKQDGSEKYYVDSVKGRFTISRDNAKNSLYLQMNSLRAEDTAVYYCAREGGWFGELAFDYWGQGTLVTVSSASTKGPSVFPLAPSSKSTSGGTAALGCLVKDYFPEPVTVSWNSGALTSGVHTFPAVLQSSGLYSLSSVVTVPSSSLGTQTYICNVNHKPSNTKVDKRVEPKSCDKTHTCPPCPAPEFEGGPSVFLFPPKPKDTLMISRTPEVTCVVVDVSHEDPEVKFNWYVDGVEVHNAKTKPREEQYNSTYRVVSVLTVLHQDWLNGKEYKCKVSNKALPASIEKTISKAKGQPREPQVYTLPPSREEMTKNQVSLTCLVKGFYPSDIAVEWESNGQPENNYKTTPPVLDSDGSFFLYSKLTVDKSRWQQGNVFSCSVMHEALHNHYTQKSLSLSPGK

SEQ ID NO: 404 - protein, 265 aa, Artificial Sequence
  durvalumab (MEDI4736) light chain
EVQLVESGGGLVQPGGSLRLSCAASGFTFSRYWMSWVRQAPGKGLEWVANEIVLTQSPGTLSLSPGERATLSCRASQRVSSSYLAWYQQKPGQAPRLLIYDASSRATGIPDRFSGSGSGTDFTLTISRLEPEDFAVYYCQQYGSLPWTFGQGTKVEIKRTVAAPSVFIFPPSDEQLKSGTASVVCLLNNFYPREAKVQWKVDNALQSGNSQESVTEQDSKDSTYSLSSTLTLSKADYEKHKVYACEVTHQGLSSPVTKSFNRGEC

SEQ ID NO: 405 - protein, 121 aa, Artificial Sequence
  durvalumab (MEDI4736)  variable heavy chain
EVQLVESGGGLVQPGGSLRLSCAASGFTFSRYWMSWVRQAPGKGLEWVANIKQDGSEKYYVDSVKGRFTISRDNAKNSLYLQMNSLRAEDTAVYYCAREGGWFGELAFDYWGQGTLVTVSS

SEQ ID NO: 406 - protein, 108 aa, Artificial Sequence
  durvalumab (MEDI4736) variable light chain
EIVLTQSPGTLSLSPGERATLSCRASQRVSSSYLAWYQQKPGQAPRLLIYDASSRATGIPDRFSGSGSGTDFTLTISRLEPEDFAVYYCQQYGSLPWTFGQGTKVEIK

SEQ ID NO: 407 - protein, 5 aa, Artificial Sequence
  durvalumab (MEDI4736) heavy chain CDR1
RYWMS

SEQ ID NO: 408 - protein, 17 aa, Artificial Sequence
  durvalumab (MEDI4736) heavy chain CDR2
NIKQDGSEKYYVDSVKG

SEQ ID NO: 409 - protein, 12 aa, Artificial Sequence
  durvalumab (MEDI4736) heavy chain CDR3
EGGWFGELAFDY

SEQ ID NO: 410 - protein, 12 aa, Artificial Sequence
  durvalumab (MEDI4736) light chain CDR1
RASQRVSSSYLA

SEQ ID NO: 411 - protein, 7 aa, Artificial Sequence
  durvalumab (MEDI4736) light chain CDR2
DASSRAT

SEQ ID NO: 412 - protein, 9 aa, Artificial Sequence
  durvalumab (MEDI4736) light chain CDR3
QQYGSLPWT

SEQ ID NO: 413 - protein, 448 aa, Artificial sequence
  atezolizumab (MPDL3280A) heavy chain
EVQLVESGGGLVQPGGSLRLSCAASGFTFSDSWIHWVRQAPGKGLEWVAWISPYGGSTYYADSVKGRFTISADTSKNTAYLQMNSLRAEDTAVYYCARRHWPGGFDYWGQGTLVTVSSASTKGPSVFPLAPSSKSTSGGTAALGCLVKDYFPEPVTVSWNSGALTSGVHTFPAVLQSSGLYSLSSVVTVPSSSLGTQTYICNVNHKPSNTKVDKKVEPKSCDKTHTCPPCPAPELLGGPSVFLFPPKPKDTLMISRTPEVTCVVVDVSHEDPEVKFNWYVDGVEVHNAKTKPREEQYASTYRVVSVLTVLHQDWLNGKEYKCKVSNKALPAPIEKTISKAKGQPREPQVYTLPPSREEMTKNQVSLTCLVKGFYPSDIAVEWESNGQPENNYKTTPPVLDSDGSFFLYSKLTVDKSRWQQGNVFSCSVMHEALHNHYTQKSLSLSPGK

SEQ ID NO: 414 - protein, 214 aa, Artificial sequence
  atezolizumab (MPDL3280A) light chain
DIQMTQSPSSLSASVGDRVTITCRASQDVSTAVAWYQQKPGKAPKLLIYSASFLYSGVPSRFSGSGSGTDFTLTISSLQPEDFATYYCQQYLYHPATFGQGTKVEIKRTVAAPSVFIFPPSDEQLKSGTASVVCLLNNFYPREAKVQWKVDNALQSGNSQESVTEQDSKDSTYSLSSTLTLSKADYEKHKVYACEVTHQGLSSPVTKSFNRGEC

SEQ ID NO: 415 - protein, 118 aa, Artificial sequence
  atezolizumab (MPDL3280A) variable heavy chain
EVQLVESGGGLVQPGGSLRLSCAASGFTFSDSWIHWVRQAPGKGLEWVAWISPYGGSTYYADSVKGRFTISADTSKNTAYLQMNSLRAEDTAVYYCARRHWPGGFDYWGQGTLVTVSA

SEQ ID NO: 416 - protein, 108 aa, Artificial sequence
  atezolizumab (MPDL3280A) variable light chain
DIQMTQSPSSLSASVGDRVTITCRASQDVSTAVAWYQQKPGKAPKLLIYSASFLYSGVPSRFSGSGSGTDFTLTISSLQPEDFATYYCQQYLYHPATFGQGTKVEIKR

SEQ ID NO: 417 - protein, 10 aa, Artificial sequence
  atezolizumab (MPDL3280A) heavy chain CDR1
  variant (6)..(6): residue is D or G
GFTFSXSWIH

SEQ ID NO: 418 - protein, 18 aa, Artificial sequence
  atezolizumab (MPDL3280A) heavy chain CDR2
  variant (4)..(4): residue is S or L
  variant (10)..(10): residue is T or S
AWIXPYGGSXYYADSVKG

SEQ ID NO: 419 - protein, 9 aa, Artificial sequence
  atezolizumab (MPDL3280A) heavy chain CDR3
RHWPGGFDY

SEQ ID NO: 420 - protein, 11 aa, Artificial sequence
  atezolizumab (MPDL3280A) light chain CDR1
  variant (5)..(5): residue is D or V
  variant (6)..(6): residue is V or I
  variant (7)..(7): residue is S or N
  variant (9)..(9): residue is A or F
  variant (10)..(10): residue is V or L
RASQXXXTXXA

SEQ ID NO: 421 - protein, 7 aa, Artificial sequence
  atezolizumab (MPDL3280A) light chain CDR2
  variant (4)..(4): residue is F or T
  variant (6)..(6): residue is Y or A
SASXLXS

SEQ ID NO: 422 - protein, 9 aa, Artificial sequence
  atezolizumab (MPDL3280A) light chain CDR3
  variant (3)..(3): residue is Y, G, F or S
  variant (4)..(4): residue is L, Y, F, or W
  variant (5)..(5): residue is Y, N, A, T, G, F or I
  variant (6)..(6): residue is H, V, P, T or I
  variant (8)..(8): residue is A, W, R, P or T
QQXXXXPXT

SEQ ID NO: 423 - protein, 450 aa, Artificial Sequence
  avelumab (MSB0010718C) heavy chain
EVQLLESGGGLVQPGGSLRLSCAASGFTFSSYIMMWVRQAPGKGLEWVSSIYPSGGITFYADTVKGRFTISRDNSKNTLYLQMNSLRAEDTAVYYCARIKLGTVTTVDYWGQGTLVTVSSASTKGPSVFPLAPSSKSTSGGTAALGCLVKDYFPEPVTVSWNSGALTSGVHTFPAVLQSSGLYSLSSVVTVPSSSLGTQTYICNVNHKPSNTKVDKKVEPKSCDKTHTCPPCPAPELLGGPSVFLFPPKPKDTLMISRTPEVTCVVVDVSHEDPEVKFNWYVDGVEVHNAKTKPREEQYNSTYRVVSVLTVLHQDWLNGKEYKCKVSNKALPAPIEKTISKAKGQPREPQVYTLPPSRDELTKNQVSLTCLVKGFYPSDIAVEWESNGQPENNYKTTPPVLDSDGSFFLYSKLTVDKSRWQQGNVFSCSVMHEALHNHYTQKSLSLSPGK

SEQ ID NO: 424 - protein, 216 aa, Artificial Sequence
  avelumab (MSB0010718C) light chain
QSALTQPASVSGSPGQSITISCTGTSSDVGGYNYVSWYQQHPGKAPKLMIYDVSNRPSGVSNRFSGSKSGNTASLTISGLQAEDEADYYCSSYTSSSTRVFGTGTKVTVLGQPKANPTVTLFPPSSEELQANKATLVCLISDFYPGAVTVAWKADGSPVKAGVETTKPSKQSNNKYAASSYLSLTPEQWKSHRSYSCQVTHEGSTVEKTVAPTECS

SEQ ID NO: 425 - protein, 120 aa, Artificial Sequence
  avelumab (MSB0010718C) variable heavy chain
EVQLLESGGGLVQPGGSLRLSCAASGFTFSSYIMMWVRQAPGKGLEWVSSIYPSGGITFYADTVKGRFTISRDNSKNTLYLQMNSLRAEDTAVYYCARIKLGTVTTVDYWGQGTLVTVSS

SEQ ID NO: 426 - protein, 110 aa, Artificial Sequence
  avelumab (MSB0010718C) variable light chain
QSALTQPASVSGSPGQSITISCTGTSSDVGGYNYVSWYQQHPGKAPKLMIYDVSNRPSGVSNRFSGSKSGNTASLTISGLQAEDEADYYCSSYTSSSTRVFGTGTKVTVL

SEQ ID NO: 427 - protein, 5 aa, Artificial Sequence
  avelumab (MSB0010718C) heavy chain CDR1
SYIMM

SEQ ID NO: 428 - protein, 17 aa, Artificial Sequence
  avelumab (MSB0010718C) heavy chain CDR2
SIYPSGGITFYADTVKG

SEQ ID NO: 429 - protein, 11 aa, Artificial Sequence
  avelumab (MSB0010718C) heavy chain CDR3
IKLGTVTTVDY

SEQ ID NO: 430 - protein, 14 aa, Artificial Sequence
  avelumab (MSB0010718C) light chain CDR1
TGTSSDVGGYNYVS

SEQ ID NO: 431 - protein, 7 aa, Artificial Sequence
  avelumab (MSB0010718C) light chain CDR2
DVSNRPS

SEQ ID NO: 432 - protein, 10 aa, Artificial Sequence
  avelumab (MSB0010718C) light chain CDR3
SSYTSSSTRV

SEQ ID NO: 433 - protein, 255 aa, Homo sapiens
  MISC_FEATURE (1)..(255)
MGNSCYNIVATLLLVLNFERTRSLQDPCSNCPAGTFCDNNRNQICSPCPPNSFSSAGGQRTCDICRQCKGVFRTRKECSSTSNAECDCTPGFHCLGAGCSMCEQDCKQGQELTKKGCKDCCFGTFNDQKRGICRPWTNCSLDGKSVLVNGTKERDVVCGPSPADLSPGASSVTPPAPAREPGHSPQIISFFLALTSTALLFLLFFLTLRFSVVKRGRKKLLYIFKQPFMRPVQTTQEEDGCSCRFPEEEEGGCEL

SEQ ID NO: 434 - protein, 256 aa, Mus musculus
  MISC_FEATURE (1)..(256)
MGNNCYNVVVIVLLLVGCEKVGAVQNSCDNCQPGTFCRKYNPVCKSCPPSTFSSIGGQPNCNICRVCAGYFRFKKFCSSTHNAECECIEGFHCLGPQCTRCEKDCRPGQELTKQGCKTCSLGTFNDQNGTGVCRPWTNCSLDGRSVLKTGTTEKDVVCGPPVVSFSPSTTISVTPEGGPGGHSLQVLTLFLALTSALLLALIFITLLFSVLKWIRKKFPHIFKQPFKKTTGAAQEEDACSCRCPQEEEGGGGGYEL

SEQ ID NO: 435 - protein, 441 aa, Artificial Sequence
  heavy chain for 4-1BB monoclonal antibody PF-05082566
EVQLVQSGAEVKKPGESLRISCKGSGYSFSTYWISWVRQMPGKGLEWMGKIYPGDSYTNYSPSFQGQVTISADKSISTAYLQWSSLKASDTAMYYCARGYGIFDYWGQGTLVTVSSASTGPSVFPLAPCSRSTSESTAALGCLVKDYFPEPVTVSWNSGALTSGVHTFPAVLQSSGLYSLSSVVTVPSSNFGTQTYTCNVDHKPSNTKVDKTVERKCCVECPPCPAPPVAGPSVFLFPPKPKDTLMISRTPEVTCVVVDVSHEDPEVQFNWYVDGVEVHNAKTKPREEQFNSTFRVVSVLTVVHQDWLNGKEYKCKVSNKGLPAPIEKTISKTKGQPREPQVYTLPPSREEMTKNQVSLTCLVKGFYPSDIAVEWESNGQPENNYKTTPPMLDSDGSFFLYSKLTVDKSRWQQGNVFSCSVMHEALHNHYTQKSLSLSPGK

SEQ ID NO: 436 - protein, 214 aa, Artificial Sequence
  light chain for 4-1BB monoclonal antibody PF-05082566
SYELTQPPSVSVSPGQTASITCSGDNIGDQYAHWYQQKPGQSPVLVIYQDKNRPSGIPERFSGSNSGNTATLTISGTQAMDEADYYCATYTGFGSLAVFGGGTKLTVLGQPKAAPSVTLFPPSSEELQANKATLVCLISDFYPGAVTVAWKADSSPVKAGVETTTPSKQSNNKYAASSYLSLTPEQWKSHRSYSCQVTHEGSTVEKTVAPTECS

SEQ ID NO: 437 - protein, 116 aa, Artificial Sequence
  heavy chain variable region for 4-1BB monoclonal antibody PF-05082566
EVQLVQSGAEVKKPGESLRISCKGSGYSFSTYWISWVRQMPGKGLEWMGKIYPGDSYTNYSPSFQGQVTISADKSISTAYLQWSSLKASDTAMYYCARGYGIFDYWGQGTLVTVSS

SEQ ID NO: 438 - protein, 108 aa, Artificial Sequence
  light chain variable region for 4-1BB monoclonal antibody PF-05082566
SYELTQPPSVSVSPGQTASITCSGDNIGDQYAHWYQQKPGQSPVLVIYQDKNRPSGIPERFSGSNSGNTATLTISGTQAMDEADYYCATYTGFGSLAVFGGGTKLTVL

SEQ ID NO: 439 - protein, 6 aa, Artificial Sequence
  heavy chain CDRl for 4-1BB monoclonal antibody PF-05082566
STYWIS

SEQ ID NO: 440 - protein, 17 aa, Artificial Sequence
  heavy chain CDR2 for 4-1BB monoclonal antibody PF-05082566
KIYPGDSYTNYSPSFQG

SEQ ID NO: 441 - protein, 8 aa, Artificial Sequence
  heavy chain CDR3 for 4-1BB monoclonal antibody PF-05082566
RGYGIFDY

SEQ ID NO: 442 - protein, 11 aa, Artificial Sequence
  light chain CDR1 for 4-1BB monoclonal antibody PF-05082566
SGDNIGDQYAH

SEQ ID NO: 443 - protein, 7 aa, Artificial Sequence
  light chain CDR2 for 4-1BB monoclonal antibody PF-05082566
QDKNRPS

SEQ ID NO: 444 - protein, 11 aa, Artificial Sequence
  light chain CDR3 for 4-1BB monoclonal antibody PF-05082566
ATYTGFGSLAV

SEQ ID NO: 445 - protein, 467 aa, Artificial Sequence [sequence omitted]

SEQ ID NO: 446 - protein, 236 aa, Artificial Sequence
  light chain for monoclonal antibody 20H4.9.LC (urelumab)
MEAPAQLLFLLLLWLPDTTGEIVLTQSPATLSLSPGERATLSCRASQSVSSYLAWYQQKPGQAPRLLIYDASNRATGIPARFSGSGSGTDFTLTISSLEPEDFAVYYCQQRSNWPPALTFGGGTKVEIKRTVAAPSVFIFPPSDEQLKSGTASVVCLLNNFYPREAKVQWKVDNALQSGNSQESVTEQDSKDSTYSLSSTLTLSKADYEKHKVYACEVTHQGLSSPVTKSFNRGEC

SEQ ID NO: 447 - protein, 448 aa, Artificial Sequence
  heavy chain for monoclonal antibody 20H4.9.h4a (urelumab) without leader
QVQLQQWGAGLLKPSETLSLTCAVYGGSFSGYYWSWIRQSPEKGLEWIGEINHGGYVTYNPSLESRVTISVDTSKNQFSLKLSSVTAADTAVYYCARDYGPGNYDWYFDLWGRGTLVTVSSASTKGPSVFPLAPCSRSTSESTAALGCLVKDYFPEPVTVSWNSGALTSGVHTFPAVLQSSGLYSLSSVVTVPSSSLGTKTYTCNVDHKPSNTKVDKRVESKYGPPCPPCPAPEFLGGPSVFLFPPKPKDTLMISRTPEVTCVVVDVSQEDPEVQFNWYVDGVEVHNAKTKPREEQFNSTYRVVSVLTVLHQDWLNGKEYKCKVSNKGLPSSIEKTISKAKGQPREPQVYTLPPSQEEMTKNQVSLTCLVKGFYPSDIAVEWESNGQPENNYKTTPPVLDSDGSFFLYSRLTVDKSRWQEGNVFSCSVMHEALHNHYTQKSLSLSLGK

SEQ ID NO: 448 - protein, 216 aa, Artificial Sequence
  light chain for monoclonal antibody 20H4.9.LC (urelumab) without leader
EIVLTQSPATLSLSPGERATLSCRASQSVSSYLAWYQQKPGQAPRLLIYDASNRATGIPARFSGSGSGTDFTLTISSLEPEDFAVYYCQQRSNWPPALTFCGGTKVEIKRTVAAPSVFIFPPSDEQLKSGTASVVCLLNNFYPREAKVQWKVDNALQSGNSQESVTEQDSKDSTYSLSSTLTLSKADYEKHKVYACEVTHQGLSSPVTKSFNRGEC

SEQ ID NO: 449 - protein, 120 aa, Artificial Sequence
  variable heavy chain for monoclonal antibody 20H4.9.h4a (urelumab)
MKHLWFFLLLVAAPRWVLSQVQLQQWGAGLLKPSETLSLTCAVYGGSFSGYYWSWIRQSPEKGLEWIGEINHGGYVTYNPSLESRVTISVDTSKNQFSLKLSSVTAADTAVYYCARDYGP

SEQ ID NO: 450 - protein, 110 aa, Artificial Sequence
  variable light chain for monoclonal antibody 20H4.9.LC (urelumab)
MEAPAQLLFLLLLWLPDTTGEIVLTQSPATLSLSPGERATLSCRASQSVSSYLAWYQQKPGQAPRLLIYDASNRATGIPARFSGSGSGTDFTLTISSLEPEDFAVYYCQQ

SEQ ID NO: 451 - protein, 5 aa, Artificial Sequence
  heavy chain CDR1 for monoclonal antibody 20H4.9.h4a (urelumab)
GYYWS

SEQ ID NO: 452 - protein, 16 aa, Artificial Sequence
  heavy chain CDR2 for monoclonal antibody 20H4.9.h4a (urelumab)
EINHGGYVTYNPSLES

SEQ ID NO: 453 - protein, 13 aa, Artificial Sequence
  heavy chain CDR3 for monoclonal antibody 20H4.9.h4a (urelumab)
DYGPGNYDWYFDL

SEQ ID NO: 454 - protein, 11 aa, Artificial Sequence
  light chain CDR1 monoclonal antibody 20H4.9.LC (urelumab)
RASQSVSSYLA

SEQ ID NO: 455 - protein, 7 aa, Artificial Sequence
  light chain CDR2 for monoclonal antibody 20H4.9.LC (urelumab)
DASNRAT

SEQ ID NO: 456 - protein, 11 aa, Artificial Sequence
  light chain CDR3 for monoclonal antibody 20H4.9.LC (urelumab)
QQRSDWPPALT

SEQ ID NO: 457 - protein, 470 aa, Artificial Sequence
  20H4.9-IgG1 amino acid sequence
MKHLWFFLLLVAAPRWVLSQVQLQQWGAGLLKPSETLSLTCAVYGGSFSGYYWSWIRQSPEKGLEWIGEINHGGYVTYNPSLESRVTISVDTSKNQFSLKLSSVTAADTAVYYCARDYGPGNYDWYFDLWGRGTLVTVSSASTKGPSVFPLAPSSKSTSGGTAALGCLVKDYFPEPVTVSWNSGALTSGVHTFPAVLQSSGLYSLSSVVTVPSSSLGTQTYICNVNHKPSNTKVDKRVEPKSCDKTHTCPPCPAPELLGGPSVFLFPPKPKDTLMISRTPEVTCVVVDVSHEDPEVKFNWYVDGVEVHNAKTKPREEQYNSTYRVVSVLTVLHQDWLNGKEYKCKVSNKALPAPIEKTISKAKGQPREPQVYTLPPSRDELTKNQVSLTCLVKGFYPSDIAVEWESNGQPENNYKTTPPVLDSDGSFFLYSKLTVDKSRWQQGNVFSCSVMHEALHNHYTQKSLSLSPGK

SEQ ID NO: 458 - protein, 460 aa, Artificial Sequence
  heavy chain for monoclonal antibody H39E3-2.h4a
MDWTWRILFLVAAATGAHSEVQLVESGGGLVQPGGSLRLSCAASGFTFSDYWMSWVRQAPGKGLEWVADIKNDGSYTNYAPSLTNRFTISRDNAKNSLYLQMNSLRAEDTAVYYCARELTGTWGQGTMVTVSSASTKGPSVFPLAPCSRSTSESTAALGCLVKDYFPEPVTVSWNSGALTSGVHTFPAVLQSSGLYSLSSVVTVPSSSLGTKTYTCNVDHKPSNTKVDKRVESKYGPPCPPCPAPEFLGGPSVFLFPPKPKDTLMISRTPEVTCVVVDVSQEDPEVQFNWYVDGVEVHNAKTKPREEQFNSTYRVVSVLTVLHQDWLNGKEYKCKVSNKGLPSSIEKTISKAKGQPREPQVYTLPPSQEEMTKNQVSLTCLVKGFYPSDIAVEWESNGQPENNYKTTPPVLDSDGSFFLYSRLTVDKSRWQEGNVFSCSVMHEALHNHYTQKSLSLSLGK

SEQ ID NO: 459 - protein, 239 aa, Artificial Sequence
  light chain for monoclonal antibody H39E3.L1
MEAPAQLLFLLLLWLPDTTGDIVMTQSPDSLAVSLGERATINCKSSQSLLSSGNQKNYLWYQQKPGQPPKLLIYYASTRQSGVPDRFSGSGSGTDFTLTISSLQAEDVAVYYCLQYDRYPFTFGQGTKLEIKRTVAAPSVFIFPPSDEQLKSGTASVVCLLNNFYPREAKVQWKVDNALQSGNSQESVTEQDSKDSTYSLSSTLTLSKADYEKHKVYACEVTHQGLSSPVTKSFNRGEC

SEQ ID NO: 460 - protein, 5 aa, Artificial Sequence
  heavy chain CDR1 for monoclonal antibody H39E3-2.h4a
DYWMS

SEQ ID NO: 461 - protein, 17 aa, Artificial Sequence
  heavy chain CDR2 for monoclonal antibody H39E3-2.h4a
DIKNDGSYTNYAPSLTN

SEQ ID NO: 462 - protein, 5 aa, Artificial Sequence
  heavy chain CDR3 for monoclonal antibody H39E3-2.h4a
ELTGT

SEQ ID NO: 463 - protein, 17 aa, Artificial Sequence
  light chain CDR1 for monoclonal antibody H39E3.L1
KSSQSLLSSGNQKNYLA

SEQ ID NO: 464 - protein, 7 aa, Artificial Sequence
  light chain CDR2 for monoclonal antibody H39E3.L1
YASTRQS

SEQ ID NO: 465 - protein, 9 aa, Artificial Sequence
  light chain CDR3 for monoclonal antibody H39E3.L1
LQYDRYPFT

SEQ ID NO: 466 - protein, 107 aa, Artificial Sequence
  light chain variable region version 1 for monoclonal antibody 4B4-1-1
DIVMTQSPATQSVTPGDRVSLSCRASQTISDYLHWYQQKSHESPRLLIKYASQSISGIPSRFSGSGSGSDFTLSINSVEPEDVGVYYCQDGHSFPPTFGGGTKLEIK

SEQ ID NO: 467 - protein, 108 aa, Artificial Sequence
  light chain variable region version 2 for monoclonal antibody 4B4-1-1
DIVMTQSPATQSVTPGDRVSLSCRASQTISDYLHWYQQKSHESPRLLIKYASQSISGIPSRFSGSGSGSDFTLSINSVEPEDVGVYYCQDGHSFPPTFGGGTKLEIKR

SEQ ID NO: 468 - protein, 118 aa, Artificial Sequence
  heavy chain variable region version  1 for monoclonal antibody 4B4-1-1
QVQLQQPGAELVKPGASVKLSCKASGYTFSSYWMHWVKQRPGQVLEWIGEINPGNGHTNYNEKFKSKATLTVDKSSSTAYMQLSSLTSEDSAVYYCARSFTTARGFAYWGQGTLVTVS

SEQ ID NO: 469 - protein, 119 aa, Artificial Sequence
  heavy chain variable region version 2 for monoclonal antibody 4B4-1-1
QVQLQQPGAELVKPGASVKLSCKASGYTFSSYWMHWVKQRPGQVLEWIGEINPGNGHTNYNEKFKSKATLTVDKSSSTAYMQLSSLTSEDSAVYYCARSFTTARGFAYWGQGTLVTVSA

SEQ ID NO: 470 - protein, 12 aa, Artificial Sequence
  light chain CDR1 for monoclonal antibody 4B4-1-1
ASQTISDYLHWY

SEQ ID NO: 471 - protein, 6 aa, Artificial Sequence
  light chain CDR2 for monoclonal antibody 4B4-1-1
ASQSIS

SEQ ID NO: 472 - protein, 8 aa, Artificial Sequence
  light chain CDR3 for monoclonal antibody 4B4-1-1
QDGHSFPP

SEQ ID NO: 473 - protein, 6 aa, Artificial Sequence
  heavy chain CDR1 version 1 for monoclonal antibody 4B4-1-1
SSYWMH

SEQ ID NO: 474 - protein, 5 aa, Artificial Sequence
  heavy chain CDR1 version 2 for monoclonal antibody 4B4-1-1
SYWMH

SEQ ID NO: 475 - protein, 18 aa, Artificial Sequence
  heavy chain CDR2 version 1 for monoclonal antibody 4B4-1-1
GEINPGNGHTNYNEKFKS

SEQ ID NO: 476 - protein, 17 aa, Artificial Sequence
  heavy chain CDR2 version 2 for monoclonal antibody 4B4-1-1
EINPGNGHTNYNEKFKS

SEQ ID NO: 477 - protein, 10 aa, Artificial Sequence
  heavy chain CDR3 for monoclonal antibody 4B4-1-1
SFTTARGFAY

SEQ ID NO: 478 - protein, 277 aa, Homo sapiens
MCVGARRLGRGPCAALLLLGLGLSTVTGLHCVGDTYPSNDRCCHECRPGNGMVSRCSRSQNTVCRPCGPGFYNDVVSSKPCKPCTWCNLRSGSERKQLCTATQDTVCRCRAGTQPLDSYKPGVDCAPCPPGHFSPGDNQACKPWTNCTLAGKHTLQPASNSSDAICEDRDPPATQPQETQGPPARPITVQPTEAWPRTSQGPSTRPVEVPGGRAVAAILGLGLVLGLLGPLAILLALYLLRRDQRLPPDAHKPPGGGSFRTPIQEEQADAHSTLAKI

SEQ ID NO: 479 - protein, 272 aa, Mus musculus
MYVWVQQPTALLLLGLTLGVTARRLNCVKHTYPSGHKCCRECQPGHGMVSRCDHTRDTLCHPCETGFYNEAVNYDTCKQCTQCNHRSGSELKQNCTPTQDTVCRCRPGTQPRQDSGYKLGVDCVPCPPGHFSPGNNQACKPWTNCTLSGKQTRHPASDSLDAVCEDRSLLATLLWETQRPTFRPTTVQSTTVWPRTSELPSPPTLVTPEGPAFAVLLGLGLGLLAPLTVLLALYLLRKAWRLPNTPKPCWGNSFRTPIQEEHTDAHFTLAKI

SEQ ID NO: 480 - protein, 12 aa, Artificial sequence
  CDR3 of scFv SC02008
DRYSQVHYALDY

SEQ ID NO: 481 - protein, 12 aa, Artificial sequence
  CDR3 of scFv SC02009
DRYVNTSNAFDY

SEQ ID NO: 482 - protein, 10 aa, Artificial sequence
  CDR3 of scFv SC02010
DMSGFHEFDY

SEQ ID NO: 483 - protein, 12 aa, Artificial sequence
  CDR3 of scFv SC02011
DRYFRQQNAFDY

SEQ ID NO: 484 - protein, 10 aa, Artificial sequence
  CDR3 of scFv SC02012
ARAAGTIFDY

SEQ ID NO: 485 - protein, 12 aa, Artificial sequence
  CDR3 of scFv SC02021
DRYITLPNALDY

SEQ ID NO: 486 - protein, 12 aa, Artificial sequence
  CDR3 of scFv SC02022
YDEPLTIYWFDS

SEQ ID NO: 487 - protein, 12 aa, Artificial sequence
  CDR3 of scFv SC02023
YDNVMGLYWFDY

SEQ ID NO: 488 - protein, 451 aa, Artificial sequence
  Amino acid sequence of heavy chain of 008
EVQLVESGGGLVQPGGSLRLSCAASGFTFSNYTMNWVRQAPGKGLEWVSAISGSGGSTYYADSVKGRFTISRDNSKNTLYLQMNSLRAEDTAVYYCAKDRYSQVHYALDYWGQGTLVTVSSASTKGPSVFPLAPSSKSTSGGTAALGCLVKDYFPEPVTVSWNSGALTSGVHTFPAVLQSSGLYSLSSVVTVPSSSLGTQTYICNVNHKPSNTKVDKRVEPKSCDKTHTCPPCPAPELLGGPSVFLFPPKPKDTLMISRTPEVTCVVVDVSHEDPEVKFNWYVDGVEVHNAKTKPREEQYNSTYRVVSVLTVLHQDWLNGKEYKCKVSNKALPAPIEKTISKAKGQPREPQVYTLPPSREEMTKNQVSLTCLVKGFYPSDIAVEWESNGQPENNYKTTPPVLDSDGSFFLYSKLTVDKSRWQQGNVFSCSVMHEALHNHYTQKSLSLSPGK

SEQ ID NO: 489 - protein, 449 aa, Artificial sequence
  Amino acid sequence of heavy chain of 011
EVQLVESGGGVVQPGRSLRLSCAASGFTFSDYTMNWVRQAPGKGLEWVSSISGGSTYYADSRKGRFTISRDNSKNTLYLQMNNLRAEDTAVYYCARDRYFRQQNAFDYWGQGTLVTVSSASTKGPSVFPLAPSSKSTSGGTAALGCLVKDYFPEPVTVSWNSGALTSGVHTFPAVLQSSGLYSLSSVVTVPSSSLGTQTYICNVNHKPSNTKVDKRVEPKSCDKTHTCPPCPAPELLGGPSVFLFPPKPKDTLMISRTPEVTCVVVDVSHEDPEVKFNWYVDGVEVHNAKTKPREEQYNSTYRVVSVLTVLHQDWLNGKEYKCKVSNKALPAPIEKTISKAKGQPREPQVYTLPPSREEMTKNQVSLTCLVKGFYPSDIAVEWESNGQPENNYKTTPPVLDSDGSFFLYSKLTVDKSRWQQGNVFSCSVMHEALHNHYTQKSLSLSPGK

SEQ ID NO: 490 - protein, 451 aa, Artificial sequence
  Amino acid sequence of heavy chain 021
EVQLVESGGGLVQPRGSLRLSCAASGFTFSSYAMNWVRQAPGKGLEWVAVISYDGSNKYYADSVKGRFTISRDNSKNTLYLQMNSLRAEDTAVYYCAKDRYITLPNALDYWGQGTLVTVSSASTKGPSVFPLAPSSKSTSGGTAALGCLVKDYFPEPVTVSWNSGALTSGVHTFPAVLQSSGLYSLSSVVTVPSSSLGTQTYICNVNHKPSNTKVDKRVEPKSCDKTHTCPPCPAPELLGGPSVFLFPPKPKDTLMISRTPEVTCVVVDVSHEDPEVKFNWYVDGVEVHNAKTKPREEQYNSTYRVVSVLTVLHQDWLNGKEYKCKVSNKALPAPIEKTISKAKGQPREPQVYTLPPSREEMTKNQVSLTCLVKGFYPSDIAVEWESNGQPENNYKTTPPVLDSDGSFFLYSKLTVDKSRWQQGNVFSCSVMHEALHNHYTQKSLSLSPGK

SEQ ID NO: 491 - protein, 450 aa, Artificial sequence
  Amino acid sequence of heavy chain of 023
EVQLVESGGGLVHPGGSLRLSCAGSGFTFSSYAMHWVRQAPGKGLEWVSAIGTGGGTYYADSVMGRFTISRDNSKNTLYLQMNSLRAEDTAVYYCARYDNVMGLYWFDYWGQGTLVTVSSASTKGPSVFPLAPSSKSTSGGTAALGCLVKDYFPEPVTVSWNSGALTSGVHTFPAVLQSSGLYSLSSVVTVPSSSLGTQTYICNVNHKPSNTKVDKRVEPKSCDKTHTCPPCPAPELLGGPSVFLFPPKPKDTLMISRTPEVTCVVVDVSHEDPEVKFNWYVDGVEVHNAKTKPREEQYNSTYRVVSVLTVLHQDWLNGKEYKCKVSNKALPAPIEKTISKAKGQPREPQVYTLPPSREEMTKNQVSLTCLVKGFYPSDIAVEWESNGQPENNYKTTPPVLDSDGSFFLYSKLTVDKSRWQQGNVFSCSVMHEALHNHYTQKSLSLSPGK

SEQ ID NO: 492 - protein, 219 aa, Artificial sequence
  Amino acid sequence of light chain of 008
DIVMTQSPDSLPVTPGEPASISCRSSQSLLHSNGYNYLDWYLQKAGQSPQLLIYLGSNRASGVPDRFSGSGSGTDFTLKISRVEAEDVGVYYCQQYYNHPTTFGQGTKLEIKRTVAAPSVFIFPPSDEQLKSGTASVVCLLNNFYPREAKVQWKVDNALQSGNSQESVTEQDSKDSTYSLSSTLTLSKADYEKHKVYACEVTHQGLSSPVTKSFNRGEC

SEQ ID NO: 493 - protein, 219 aa, Artificial sequence; identical to SEQ ID NO: 492
  Amino acid sequence of light chain of 011

SEQ ID NO: 494 - protein, 219 aa, Artificial sequence
  Amino acid sequence of light chain of 021
DIQMTQSPVSLPVTPGEPASISCRSSQSLLHSNGYNYLDWYLQKPGQSPQLLIYLGSNRASGVPDRFSGSGSGTDFTLKISRVEAEDVGVYYCQQYKSNPPTFGQGTKVEIKRTVAAPSVFIFPPSDEQLKSGTASVVCLLNNFYPREAKVQWKVDNALQSGNSQESVTEQDSKDSTYSLSSTLTLSKADYEKHKVYACEVTHQGLSSPVTKSFNRGEC

SEQ ID NO: 495 - protein, 214 aa, Artificial sequence
  Amino acid sequence of light chain of 023
EIVLTQSPATLSLSPGERATLSCRASQSVSSYLAWYQQKPGQAPRLLIYDASNRATGIPARFSGSGSGTDFTLTISSLEPEDFAVYYCQQRSNWPPAFGGGTKVEIKRTVAAPSVFIFPPSDEQLKSGTASVVCLLNNFYPREAKVQWKVDNALQSGNSQESVTEQDSKDSTYSLSSTLTLSKADYEKHKVYACEVTHQGLSSPVTKSFNRGEC

SEQ ID NO: 496 - protein, 5 aa, Artificial Sequence
  Synthetic Construct
SYSMN

SEQ ID NO: 497 - protein, 17 aa, Artificial Sequence
  Synthetic Construct
YISSSSSTIDYADSVKG

SEQ ID NO: 498 - protein, 9 aa, Artificial Sequence
  Synthetic Construct
ESGWYLFDY

SEQ ID NO: 499 - protein, 11 aa, Artificial Sequence
  Synthetic Construct
RASQGISSWLA

SEQ ID NO: 500 - protein, 7 aa, Artificial Sequence
  Synthetic Construct
AASSLQS

SEQ ID NO: 501 - protein, 9 aa, Artificial Sequence
  Synthetic Construct
QQYNSYPPT

SEQ ID NO: 502 - protein, 118 aa, Artificial Sequence
  Synthetic Construct
EVQLVESGGGLVQPGGSLRLSCAASGFTFSSYSMNWVRQAPGKGLEWVSYISSSSSTIDYADSVKGRFTISRDNAKNSLYLQMNSLRDEDTAVYYCARESGWYLFDYWGQGTLVTVSS

SEQ ID NO: 503 - protein, 107 aa, Artificial Sequence
  Synthetic Construct
DIQMTQSPSSLSASVGDRVTITCRASQGISSWLAWYQQKPEKAPKSLIYAASSLQSGVPSRFSGSGSGTDFTLTISSLQPEDFATYYCQQYNSYPPTFGGGTKVEIK

SEQ ID NO: 504 - protein, 444 aa, Artificial Sequence
  Synthetic Construct
EVQLVESGGGLVQPGGSLRLSCAASGFTFSSYSMNWVRQAPGKGLEWVSYISSSSSTIDYADSVKGRFTISRDNAKNSLYLQMNSLRDEDTAVYYCARESGWYLFDYWGQGTLVTVSSASTKGPSVFPLAPCSRSTSESTAALGCLVKDYFPEPVTVSWNSGALTSGVHTFPAVLQSSGLYSLSSVVTVPSSNFGTQTYTCNVDHKPSNTKVDKTVERKCCVECPPCPAPPVAGPSVFLFPPKPKDTLMISRTPEVTCVVVDVSHEDPEVQFNWYVDGVEVHNAKTKPREEQFNSTFRVVSVLTVVHQDWLNGKEYKCKVSNKGLPAPIEKTISKTKGQPREPQVYTLPPSREEMTKNQVSLTCLVKGFYPSDIAVEWESNGQPENNYKTTPPMLDSDGSFFLYSKLTVDKSRWQQGNVFSCSVMHEALHNHYTQKSLSLSPGK

SEQ ID NO: 505 - protein, 214 aa, Artificial Sequence
  Synthetic Construct
DIQMTQSPSSLSASVGDRVTITCRASQGISSWLAWYQQKPEKAPKSLIYAASSLQSGVPSRFSGSGSGTDFTLTISSLQPEDFATYYCQQYNSYPPTFGGGTKVEIKRTVAAPSVFIFPPSDEQLKSGTASVVCLLNNFYPREAKVQWKVDNALQSGNSQESVTEQDSKDSTYSLSSTLTLSKADYEKHKVYACEVTHQGLSSPVTKSFNRGEC

SEQ ID NO: 506 - protein, 5 aa, Artificial Sequence
  Synthetic Construct
DYAMH

SEQ ID NO: 507 - protein, 17 aa, Artificial Sequence
  Synthetic Construct
GISWNSGSIGYADSVKG

SEQ ID NO: 508 - protein, 15 aa, Artificial Sequence
  Synthetic Construct
DQSTADYYFYYGMDV

SEQ ID NO: 509 - protein, 11 aa, Artificial Sequence
  Synthetic Construct
RASQSVSSYLA

SEQ ID NO: 510 - protein, 7 aa, Artificial Sequence
  Synthetic Construct
DASNRAT

SEQ ID NO: 511 - protein, 8 aa, Artificial Sequence
  Synthetic Construct
QQRSNWPT

SEQ ID NO: 512 - protein, 124 aa, Artificial Sequence
  Synthetic Construct
EVQLVESGGGLVQPGRSLRLSCAASGFTFDDYAMHWVRQAPGKGLEWVSGISWNSGSIGYADSVKGRFTISRDNAKNSLYLQMNSLRAEDTALYYCAKDQSTADYYFYYGMDVWGQGTTVTVSS

SEQ ID NO: 513 - protein, 106 aa, Artificial Sequence
  Synthetic Construct
EIVVTQSPATLSLSPGERATLSCRASQSVSSYLAWYQQKPGQAPRLLIYDASNRATGIPARFSGSGSGTDFTLTISSLEPEDFAVYYCQQRSNWPTFGQGTKVEIK

SEQ ID NO: 514 - protein, 450 aa, Artificial Sequence
  Synthetic Construct
EVQLVESGGGLVQPGRSLRLSCAASGFTFDDYAMHWVRQAPGKGLEWVSGISWNSGSIGYADSVKGRFTISRDNAKNSLYLQMNSLRAEDTALYYCAKDQSTADYYFYYGMDVWGQGTTVTVSSASTKGPSVFPLAPCSRSTSESTAALGCLVKDYFPEPVTVSWNSGALTSGVHTFPAVLQSSGLYSLSSVVTVPSSNFGTQTYTCNVDHKPSNTKVDKTVERKCCVECPPCPAPPVAGPSVFLFPPKPKDTLMISRTPEVTCVVVDVSHEDPEVQFNWYVDGVEVHNAKTKPREEQFNSTFRVVSVLTVVHQDWLNGKEYKCKVSNKGLPAPIEKTISKTKGQPREPQVYTLPPSREEMTKNQVSLTCLVKGFYPSDIAVEWESNGQPENNYKTTPPMLDSDGSFFLYSKLTVDKSRWQQGNVFSCSVMHEALHNHYTQKSLSLSPGK

SEQ ID NO: 515 - protein, 213 aa, Artificial Sequence
  Synthetic Construct
EIVVTQSPATLSLSPGERATLSCRASQSVSSYLAWYQQKPGQAPRLLIYDASNRATGIPARFSGSGSGTDFTLTISSLEPEDFAVYYCQQRSNWPTFGQGTKVEIKRTVAAPSVFIFPPSDEQLKSGTASVVCLLNNFYPREAKVQWKVDNALQSGNSQESVTEQDSKDSTYSLSSTLTLSKADYEKHKVYACEVTHQGLSSPVTKSFNRGEC

SEQ ID NO: 516 - protein, 5 aa, Artificial Sequence
  Synthetic Construct
DYSMH

SEQ ID NO: 517 - protein, 17 aa, Artificial Sequence
  Synthetic Construct
WINTETGEPTYADDFKG

SEQ ID NO: 518 - protein, 13 aa, Artificial Sequence
  Synthetic Construct
PYYDYVSYYAMDY

SEQ ID NO: 519 - protein, 122 aa, Artificial Sequence
  Synthetic Construct
QIQLVQSGPELKKPGETVKISCKASGYTFTDYSMHWVKQAPGKGLKWMGWINTETGEPTYADDFKGRFAFSLETSASTAYLQINNLKNEDTATYFCANPYYDYVSYYAMDYWGHGTSVTVSS

SEQ ID NO: 520 - protein, 122 aa, Artificial Sequence
  Description of Artificial Sequence: Synthetic polypeptide
QVQLVQSGSELKKPGASVKVSCKASGYTFTDYSMHWVRQAPGQGLKWMGWINTETGEPTYADDFKGRFVFSLDTSVSTAYLQISSLKAEDTAVYYCANPYYDYVSYYAMDYWGQGTTVTVSS

SEQ ID NO: 521 - protein, 11 aa, Artificial Sequence
  Synthetic Construct
KASQDVSTAVA

SEQ ID NO: 522 - protein, 7 aa, Artificial Sequence
  Synthetic Construct
SASYLYT

SEQ ID NO: 523 - protein, 9 aa, Artificial Sequence
  Synthetic Construct
QQHYSTPRT

SEQ ID NO: 524 - protein, 107 aa, Artificial Sequence
  Synthetic Construct
DIVMTQSHKFMSTSVRDRVSITCKASQDVSTAVAWYQQKPGQSPKLLIYSASYLYTGVPDRFTGSGSGTDFTFTISSVQAEDLAVYYCQQHYSTPRTFGGGTKLEIK

SEQ ID NO: 525 - protein, 107 aa, Artificial Sequence
  Description of Artificial Sequence: Synthetic polypeptide
DIQMTQSPSSLSASVGDRVTITCKASQDVSTAVAWYQQKPGKAPKLLIYSASYLYTGVPSRFSGSGSGTDFTFTISSLQPEDIATYYCQQHYSTPRTFGQGTKLEIK

SEQ ID NO: 526 - protein, 5 aa, Artificial Sequence
  Synthetic Construct
SHDMS

SEQ ID NO: 527 - protein, 17 aa, Artificial Sequence
  Synthetic Construct
AINSDGGSTYYPDTMER

SEQ ID NO: 528 - protein, 11 aa, Artificial Sequence
  Synthetic Construct
HYDDYYAWFAY

SEQ ID NO: 529 - protein, 120 aa, Artificial Sequence
  Synthetic Construct
EVQLVESGGGLVQPGESLKLSCESNEYEFPSHDMSWVRKTPEKRLELVAAINSDGGSTYYPDTMERRFIISRDNTKKTLYLQMSSLRSEDTALYYCARHYDDYYAWFAYWGQGTLVTVSA

SEQ ID NO: 530 - protein, 120 aa, Artificial Sequence
  Description of Artificial Sequence: Synthetic polypeptide
EVQLVESGGGLVQPGGSLRLSCAASEYEFPSHDMSWVRQAPGKGLELVAAINSDGGSTYYPDTMERRFTISRDNAKNSLYLQMNSLRAEDTAVYYCARHYDDYYAWFAYWGQGTMVTVSS

SEQ ID NO: 531 - protein, 15 aa, Artificial Sequence
  Synthetic Construct
RASKSVSTSGYSYMH

SEQ ID NO: 532 - protein, 7 aa, Artificial Sequence
  Synthetic Construct
LASNLES

SEQ ID NO: 533 - protein, 9 aa, Artificial Sequence
  Synthetic Construct
QHSRELPLT

SEQ ID NO: 534 - protein, 111 aa, Artificial Sequence
  Synthetic Construct
DIVLTQSPASLAVSLGQRATISCRASKSVSTSGYSYMHWYQQKPGQPPKLLIYLASNLESGVPARFSGSGSGTDFTLNIHPVEEEDAATYYCQHSRELPLTFGAGTKLELK

SEQ ID NO: 535 - protein, 111 aa, Artificial Sequence
  Description of Artificial Sequence: Synthetic polypeptide
EIVLTQSPATLSLSPGERATLSCRASKSVSTSGYSYMHWYQQKPGQAPRLLIYLASNLESGVPARFSGSGSGTDFTLTISSLEPEDFAVYYCQHSRELPLTFGGGTKVEIK

SEQ ID NO: 536 - protein, 469 aa, Artificial Sequence [sequence omitted]

SEQ ID NO: 537 - protein, 233 aa, Artificial Sequence
  Synthetic Construct
MRPSIQFLGLLLFWLHGAQCDIQMTQSPSSLSASLGGKVTITCKSSQDINKYIAWYQHKPGKGPRLLIHYTSTLQPGIPSRFSGSGSGRDYSFSISNLEPEDIATYYCLQYDNLLTFGAGTKLELKRTVAAPSVFIFPPSDEQLKSGTASVVCLLNNFYPREAKVQWKVDNALQSGNSQESVTEQDSKDSTYSLSSTLTLSKADYEKHKVYACEVTHQGLSSPVTKSFNRGEC

SEQ ID NO: 538 - protein, 138 aa, Artificial Sequence
  Synthetic Construct
MYLGLNYVFIVFLLNGVQSEVKLEESGGGLVQPGGSMKLSCAASGFTFSDAWMDWVRQSPEKGLEWVAEIRSKANNHATYYAESVNGRFTISRDDSKSSVYLQMNSLRAEDTGIYYCTWGEVFYFDYWGQGTTLTVSS

SEQ ID NO: 539 - protein, 126 aa, Artificial Sequence
  Synthetic Construct
MRPSIQFLGLLLFWLHGAQCDIQMTQSPSSLSASLGGKVTITCKSSQDINKYIAWYQHKPGKGPRLLIHYTSTLQPGIPSRFSGSGSGRDYSFSISNLEPEDIATYYCLQYDNLLTFGAGTKLELK

SEQ ID NO: 540 - protein, 119 aa, Artificial Sequence
  Description of Artificial Sequence: Synthetic amino acid sequence of clone 20E5 heavy chain variable region
EVQLQQSGPELVKPGASVKMSCKASGYTFTSYVMHWVKQKPGQGLEWIGYINPYNDGTKYNEKFKGKATLTSDKSSSTAYMELSSLTSEDSAVYYCANYYGSSLSMDYWGQGTSVTVSS

SEQ ID NO: 541 - protein, 108 aa, Artificial Sequence
  Description of Artificial Sequence: Synthetic amino acid sequence of clone 20E5 light chain variable region
DIQMTQTTSSLSASLGDRVTISCRASQDISNYLNWYQQKPDGTVKLLIYYTSRLHSGVPSRFSGSGSGTDYSLTISNLEQEDIATYFCQQGNTLPWTFGGGTKLEIKR

SEQ ID NO: 542 - protein, 10 aa, Artificial Sequence
  Description of Artificial Sequence: Synthetic amino acid sequence of clone 20E5 heavy chain CDR1
GYTFTSYVMH

SEQ ID NO: 543 - protein, 17 aa, Artificial Sequence
  Description of Artificial Sequence: Synthetic amino acid sequence of clone 20E5 heavy chain CDR2
YINPYNDGTKYNEKFKG

SEQ ID NO: 544 - protein, 10 aa, Artificial Sequence
  Description of Artificial Sequence: Synthetic amino acid sequence of clone 20E5 heavy chain CDR3
YYGSSLSMDY

SEQ ID NO: 545 - protein, 11 aa, Artificial Sequence
  Description of Artificial Sequence: Synthetic amino acid sequence of clone 20E5 light chain CDR1
RASQDISNYLN

SEQ ID NO: 546 - protein, 7 aa, Artificial Sequence
  Description of Artificial Sequence: Synthetic amino acid sequence of clone 20E5 light chain CDR2
YTSRLHS

SEQ ID NO: 547 - protein, 9 aa, Artificial Sequence
  Description of Artificial Sequence: Synthetic amino acid sequence of clone 20E5 light chain CDR3
QQGNTLPWT

SEQ ID NO: 548 - protein, 121 aa, Artificial Sequence
  Description of Artificial Sequence: Synthetic amino acid sequence of clone 12H3 heavy chain variable region
EVQLQQSGPELVKPGASVKISCKTSGYTFKDYTMHWVKQSHGKSLEWIGGIYPNNGGSTYNQNFKDKATLTVDKSSSTAYMEFRSLTSEDSAVYYCARMGYHGPHLDFDVWGAGTTVTVSP

SEQ ID NO: 549 - protein, 108 aa, Artificial Sequence
  Description of Artificial Sequence: Synthetic amino acid sequence of clone 12H3 light chain variable region
DIVMTQSHKFMSTSLGDRVSITCKASQDVGAAVAWYQQKPGQSPKLLIYWASTRHTGVPDRFTGGGSGTDFTLTISNVQSEDLTDYFCQQYINYPLTFGGGTKLEIKR

SEQ ID NO: 550 - protein, 10 aa, Artificial Sequence
  Description of Artificial Sequence: Synthetic amino acid sequence of clone 12H3 heavy chain CDR1
GYTFKDYTMH

SEQ ID NO: 551 - protein, 17 aa, Artificial Sequence
  Description of Artificial Sequence: Synthetic amino acid sequence of clone 12H3 heavy chain CDR2
GIYPNNGGSTYNQNFKD

SEQ ID NO: 552 - protein, 12 aa, Artificial Sequence
  Description of Artificial Sequence: Synthetic amino acid sequence of clone 12H3 heavy chain CDR2
MGYHGPHLDFDV

SEQ ID NO: 553 - protein, 11 aa, Artificial Sequence
  Description of Artificial Sequence: Synthetic amino acid sequence of clone 12H3 light chain CDR1
KASQDVGAAVA

SEQ ID NO: 554 - protein, 7 aa, Artificial Sequence
  Description of Artificial Sequence: Synthetic amino acid sequence of clone 12H3 light chain CDR2
WASTRHT

SEQ ID NO: 555 - protein, 9 aa, Artificial Sequence
  Description of Artificial Sequence: Synthetic amino acid sequence of clone 12H3 light chain CDR3
QQYINYPLT

SEQ ID NO: 556 - protein, 119 aa, Artificial Sequence
  Synthetic Construct
QVQLVQSGAEVKKPGASVKVSCKASGYTFTSYVMHWVRQAPGQRLEWMGYINPYNDGTKYNEKFKGRVTITSDTSASTAYMELSSLRSEDTAVYYCANYYGSSLSMDYWGQGTLVTVSS

SEQ ID NO: 557 - protein, 108 aa, Artificial Sequence
  Synthetic Construct
DIQMTQSPSSLSASVGDRVTITCRASQDISNYLNWYQQKPGKAPKLLIYYTSRLHSGVPSRFSGSGSGTDYTLTISSLQPEDFATYYCQQGNTLPWTFGQGTKVEIKR

SEQ ID NO: 558 - protein, 108 aa, Artificial Sequence
  Synthetic Construct
DIQMTQSPSSLSASVGDRVTITCRASQDISNYLNWYQQKPGKAVKLLIYYTSRLHSGVPSRFSGSGSGTDYTLTISSLQPEDFATYFCQQGNTLPWTFGQGTKVEIKR

SEQ ID NO: 559 - protein, 119 aa, Artificial Sequence
  Synthetic Construct
QVQLVQSGAEVKKPGASVKVSCKASGYTFTSYVMHWVRQAPGQRLEWIGYINPYNDGTKYNEKFKGRATITSDTSASTAYMELSSLRSEDTAVYYCANYYGSSLSMDYWGQGTLVTVSS

SEQ ID NO: 560 - protein, 119 aa, Artificial Sequence
  Synthetic Construct
QVQLVQSGAEVKKPGASVKVSCKASGYTFTSYVMHWVRQAPGQRLEWIGYINPYNDGTKYNEKFKGRATLTSDKSASTAYMELSSLRSEDTAVYYCANYYGSSLSMDYWGQGTLVTVSS

SEQ ID NO: 561 - protein, 121 aa, Artificial Sequence
  Synthetic Construct
QVQLVQSGAEVKKPGSSVKVSCKASGYTFKDYTMHWVRQAPGQGLEWMGGIYPNNGGSTYNQNFKDRVTITADKSTSTAYMELSSLRSEDTAVYYCARMGYHGPHLDFDVWGQGTTVTVSS

SEQ ID NO: 562 - protein, 108 aa, Artificial Sequence
  Synthetic Construct
DIQMTQSPSSLSASVGDRVTITCKASQDVGAAVAWYQQKPGKAPKLLIYWASTRHTGVPSRFSGSGSGTDFTLTISSLQPEDFATYYCQQYINYPLTFGGGTKVEIKR

SEQ ID NO: 563 - protein, 108 aa, Artificial Sequence
  Synthetic Construct
DIQMTQSPSSLSASVGDRVTITCKASQDVGAAVAWYQQKPGKAPKLLIYWASTRHTGVPDRFSGGGSGTDFTLTISSLQPEDFATYYCQQYINYPLTFGGGTKVEIKR

SEQ ID NO: 564 - protein, 121 aa, Artificial Sequence
  Synthetic Construct
QVQLVQSGAEVKKPGSSVKVSCKASGYTFKDYTMHWVRQAPGQGLEWIGGIYPNNGGSTYNQNFKDRVTLTADKSTSTAYMELSSLRSEDTAVYYCARMGYHGPHLDFDVWGQGTTVTVSS

SEQ ID NO: 565 - protein, 121 aa, Artificial Sequence
  Synthetic Construct
QVQLVQSGAEVKKPGSSVKVSCKASGYTFKDYTMHWVRQAPGQGLEWIGGIYPNNGGSTYNQNFKDRATLTVDKSTSTAYMELSSLRSEDTAVYYCARMGYHGPHLDFDVWGQGTTVTVSS

SEQ ID NO: 566 - protein, 451 aa, Artificial Sequence; identical to SEQ ID NO: 365
  rituximab heavy chain

SEQ ID NO: 567 - protein, 213 aa, Artificial Sequence; identical to SEQ ID NO: 366
  rituximab light chain

SEQ ID NO: 568 - protein, 449 aa, Artificial Sequence; identical to SEQ ID NO: 367
  obinutuzumab heavy chain

SEQ ID NO: 569 - protein, 219 aa, Artificial Sequence; identical to SEQ ID NO: 368
  obinutuzumab light chain

SEQ ID NO: 570 - protein, 122 aa, Artificial Sequence; identical to SEQ ID NO: 369
  ofatumumab variable heavy chain

SEQ ID NO: 571 - protein, 107 aa, Artificial Sequence; identical to SEQ ID NO: 370
  ofatumumab variable light chain

SEQ ID NO: 572 - protein, 222 aa, Artificial Sequence; identical to SEQ ID NO: 371
  ofatumumab Fab fragment heavy chain

SEQ ID NO: 573 - protein, 211 aa, Artificial Sequence; identical to SEQ ID NO: 372
  ofatumumab Fab fragment light chain

SEQ ID NO: 574 - protein, 451 aa, Artificial Sequence; identical to SEQ ID NO: 373
  veltuzumab heavy chain

SEQ ID NO: 575 - protein, 213 aa, Artificial Sequence; identical to SEQ ID NO: 374
  veltuzumab light chain

SEQ ID NO: 576 - protein, 447 aa, Artificial Sequence; identical to SEQ ID NO: 375
  tositumomab heavy chain

SEQ ID NO: 577 - protein, 210 aa, Artificial Sequence; identical to SEQ ID NO: 376
  tositumomab light chain

SEQ ID NO: 578 - protein, 443 aa, Artificial Sequence; identical to SEQ ID NO: 377
  ibritumomab heavy chain

SEQ ID NO: 579 - protein, 209 aa, Artificial Sequence; identical to SEQ ID NO: 378
  ibritumomab light chain

SEQ ID NO: 580 - protein, 440 aa, Artificial Sequence; identical to SEQ ID NO: 379
  nivolumab heavy chain

SEQ ID NO: 581 - protein, 214 aa, Artificial Sequence; identical to SEQ ID NO: 380
  nivolumab light chain

SEQ ID NO: 582 - protein, 113 aa, Artificial Sequence [sequence omitted]

SEQ ID NO: 583 - protein, 107 aa, Artificial Sequence [sequence omitted]

SEQ ID NO: 584 - protein, 5 aa, Artificial Sequence
  nivolumab heavy chain CDR1
NSGMH

SEQ ID NO: 585 - protein, 17 aa, Artificial Sequence
  nivolumab heavy chain CDR2
VIWYDGSKRYYADSVKG

SEQ ID NO: 586 - protein, 4 aa, Artificial Sequence
  nivolumab heavy chain CDR3
NDDY

SEQ ID NO: 587 - protein, 11 aa, Artificial Sequence
  nivolumab light chain CDR1
RASQSVSSYLA

SEQ ID NO: 588 - protein, 7 aa, Artificial Sequence
  nivolumab light chain CDR2
DASNRAT

SEQ ID NO: 589 - protein, 9 aa, Artificial Sequence
  nivolumab light chain CDR3
QQSSNWPRT

SEQ ID NO: 590 - protein, 447 aa, Artificial Sequence; identical to SEQ ID NO: 389
  pembrolizumab heavy chain

SEQ ID NO: 591 - protein, 218 aa, Artificial Sequence; identical to SEQ ID NO: 390
  pembrolizumab light chain

SEQ ID NO: 592 - protein, 120 aa, Artificial Sequence [sequence omitted]

SEQ ID NO: 593 - protein, 111 aa, Artificial Sequence [sequence omitted]

SEQ ID NO: 594 - protein, 5 aa, Artificial Sequence
  pembrolizumab heavy chain CDR1
NYYMY

SEQ ID NO: 595 - protein, 16 aa, Artificial Sequence
  pembrolizumab heavy chain CDR2
GINPSNGGTNFNEKFK

SEQ ID NO: 596 - protein, 11 aa, Artificial Sequence
  pembrolizumab heavy chain CDR3
RDYRFDMGFDY

SEQ ID NO: 597 - protein, 15 aa, Artificial Sequence
  pembrolizumab light chain CDR1
RASKGVSTSGYSYLH

SEQ ID NO: 598 - protein, 7 aa, Artificial Sequence
  pembrolizumab light chain CDR2
LASYLES

SEQ ID NO: 599 - protein, 9 aa, Artificial Sequence
  pembrolizumab light chain CDR3
QHSRDLPLT

SEQ ID NO: 600 - protein, 447 aa, Artificial Sequence; identical to SEQ ID NO: 399
  pidilizumab heavy chain

SEQ ID NO: 601 - protein, 213 aa, Artificial Sequence; identical to SEQ ID NO: 400
  pidilizumab light chain

SEQ ID NO: 602 - protein, 117 aa, Artificial Sequence; identical to SEQ ID NO: 401
  pidilizumab variable heavy chain

SEQ ID NO: 603 - protein, 106 aa, Artificial Sequence; identical to SEQ ID NO: 402
  pidilizumab variable light chain

SEQ ID NO: 604 - protein, 451 aa, Artificial Sequence; identical to SEQ ID NO: 403
  durvalumab (MEDI4736) heavy chain

SEQ ID NO: 605 - protein, 265 aa, Artificial Sequence; identical to SEQ ID NO: 404
  durvalumab (MEDI4736) light chain

SEQ ID NO: 606 - protein, 121 aa, Artificial Sequence; identical to SEQ ID NO: 405
  durvalumab (MEDI4736) variable heavy chain

SEQ ID NO: 607 - protein, 108 aa, Artificial Sequence; identical to SEQ ID NO: 406
  durvalumab (MEDI4736) variable light chain

SEQ ID NO: 608 - protein, 5 aa, Artificial Sequence
  durvalumab (MEDI4736) heavy chain CDR1
RYWMS

SEQ ID NO: 609 - protein, 17 aa, Artificial Sequence
  durvalumab (MEDI4736) heavy chain CDR2
NIKQDGSEKYYVDSVKG

SEQ ID NO: 610 - protein, 12 aa, Artificial Sequence
  durvalumab (MEDI4736) heavy chain CDR3
EGGWFGELAFDY

SEQ ID NO: 611 - protein, 12 aa, Artificial Sequence
  durvalumab (MEDI4736) light chain CDR1
RASQRVSSSYLA

SEQ ID NO: 612 - protein, 7 aa, Artificial Sequence
  durvalumab (MEDI4736) light chain CDR2
DASSRAT

SEQ ID NO: 613 - protein, 9 aa, Artificial Sequence
  durvalumab (MEDI4736) light chain CDR3
QQYGSLPWT

SEQ ID NO: 614 - protein, 448 aa, Artificial sequence; identical to SEQ ID NO: 413
  atezolizumab (MPDL3280A) heavy chain

SEQ ID NO: 615 - protein, 214 aa, Artificial sequence; identical to SEQ ID NO: 414
  atezolizumab (MPDL3280A) light chain

SEQ ID NO: 616 - protein, 118 aa, Artificial sequence; identical to SEQ ID NO: 415
  atezolizumab (MPDL3280A) variable heavy chain

SEQ ID NO: 617 - protein, 108 aa, Artificial sequence; identical to SEQ ID NO: 416
  atezolizumab (MPDL3280A) variable light chain

SEQ ID NO: 618 - protein, 10 aa, Artificial sequence
  atezolizumab (MPDL3280A) heavy chain CDR1
  variant (6)..(6): residue is D or G
GFTFSXSWIH

SEQ ID NO: 619 - protein, 18 aa, Artificial sequence
  atezolizumab (MPDL3280A) heavy chain CDR2
  variant (4)..(4): residue is S or L
  variant (10)..(10): residue is T or S
AWIXPYGGSXYYADSVKG

SEQ ID NO: 620 - protein, 9 aa, Artificial sequence
  atezolizumab (MPDL3280A) heavy chain CDR3
RHWPGGFDY

SEQ ID NO: 621 - protein, 11 aa, Artificial sequence
  atezolizumab (MPDL3280A) light chain CDR1
  variant (5)..(5): residue is D or V
  variant (6)..(6): residue is V or I
  variant (7)..(7): residue is S or N
  variant (9)..(9): residue is A or F
  variant (10)..(10): residue is V or L
RASQXXXTXXA

SEQ ID NO: 622 - protein, 7 aa, Artificial sequence
  atezolizumab (MPDL3280A) light chain CDR2
  variant (4)..(4): residue is F or T
  variant (6)..(6): residue is Y or A
SASXLXS

SEQ ID NO: 623 - protein, 9 aa, Artificial sequence
  atezolizumab (MPDL3280A) light chain CDR3
  variant (3)..(3): residue is Y, G, F or S
  variant (4)..(4): residue is L, Y, F, or W
  variant (5)..(5): residue is Y, N, A, T, G, F or I
  variant (6)..(6): residue is H, V, P, T or I
  variant (8)..(8): residue is A, W, R, P or T
QQXXXXPXT

SEQ ID NO: 624 - protein, 450 aa, Artificial Sequence; identical to SEQ ID NO: 423
  avelumab (MSB0010718C) heavy chain

SEQ ID NO: 625 - protein, 216 aa, Artificial Sequence; identical to SEQ ID NO: 424
  avelumab (MSB0010718C) light chain

SEQ ID NO: 626 - protein, 120 aa, Artificial Sequence; identical to SEQ ID NO: 425
  avelumab (MSB0010718C) variable heavy chain

SEQ ID NO: 627 - protein, 110 aa, Artificial Sequence; identical to SEQ ID NO: 426
  avelumab (MSB0010718C) variable light chain

SEQ ID NO: 628 - protein, 5 aa, Artificial Sequence
  avelumab (MSB0010718C) heavy chain CDR1
SYIMM

SEQ ID NO: 629 - protein, 17 aa, Artificial Sequence
  avelumab (MSB0010718C) heavy chain CDR2
SIYPSGGITFYADTVKG

SEQ ID NO: 630 - protein, 11 aa, Artificial Sequence
  avelumab (MSB0010718C) heavy chain CDR3
IKLGTVTTVDY

SEQ ID NO: 631 - protein, 14 aa, Artificial Sequence
  avelumab (MSB0010718C) light chain CDR1
TGTSSDVGGYNYVS

SEQ ID NO: 632 - protein, 7 aa, Artificial Sequence
  avelumab (MSB0010718C) light chain CDR2
DVSNRPS

SEQ ID NO: 633 - protein, 10 aa, Artificial Sequence
  avelumab (MSB0010718C) light chain CDR3
SSYTSSSTRV
